(19) United States
(12) Patent Application Publication
(10) Pub. No.: US 2026/0146251 A1
(43) Pub. Date: May 28, 2026

(54) DOUBLE STRANDED RNAi AGENTS, COMPOSITIONS AND METHODS OF USE

(71) Applicant: Novartis AG, Basel (CH)

(72) Inventors: Stefan HAEMMIG, Bottmingen (CH); Caitlin Jeanette HAGEN, Wilmington, MA (US); Juerg HUNZIKER, Aarau (CH); Ge TAN, Bottmingen (CH); John Wesley TRAUGER, Boston, MA (US); Jan WEILER, Loerrach (DE)

(21) Appl. No.: 19/398,805

(22) Filed: Nov. 24, 2025

Related U.S. Application Data
(60) Provisional application No. 63/724,671, filed on Nov. 25, 2024.

(51) Int. Cl. C12N 15/113

(52) U.S. Cl. CPC C12N 15/1137; C12Y 304/21061; C12N 2310/14; C12N 2310/315; C12N 2310/321; C12N 2310/322; C12N 2310/351

(57) ABSTRACT

Disclosed are, inter alia, double stranded RNAi (dsRNAi) agents inhibiting expression of proprotein convertase subtilisin kexin 9 (PCSK9), for example, human PCSK9, compositions including the same, and methods of treatment using the same.

### CROSS-REFERENCE TO RELATED APPLICATIONS

[0001] The present application claims priority and benefit to the U.S. Patent Application No. 63/724,671 filed Nov. 25, 2024, the disclosure of which is incorporated herein by reference in its entirety.

### SEQUENCE LISTING

[0002] The instant application contains a Sequence Listing which has been submitted electronically in XML format and is hereby incorporated by reference in its entirety. Said XML copy, created on Oct. 10, 2025, is named PAT059857-US-SECO1_SL.xml and is 4,029,476 bytes in size.

### TECHNICAL FIELD

[0003] The present disclosure provides, inter alia, double stranded RNAi (dsRNAi) agents inhibiting expression of proprotein convertase subtilisin kexin 9 (PCSK9), for example, human PCSK9, compositions including the same, and methods of treatment using the same.

### BACKGROUND

[0004] Cumulative low-density lipoprotein cholesterol (LDL-C) exposure in the arterial wall is a major cause of atherosclerotic cardiovascular disease (ASCVD). The level of LDL-C in the arterial wall can be controlled (e.g., lowered) by modulating cholesterol homeostasis (e.g., cholesterol biosynthesis in liver cells) and upregulating LDL-C uptake from the blood.

[0005] Proprotein convertase subtilisin kexin 9 (PCSK9) is a member of the subtilisin serine protease family and is involved in cholesterol metabolism and homeostasis. A liver cell uptakes LDL-C via low-density lipoprotein receptor (LDLR) to directly remove such atherosclerotic lipoproteins from the plasma via uptake into a liver cell. If the level of LDLR decreases, LDL-C level increases in circulation, and the elevated circulating LDL-C level causes increased deposition in the arteries of LDL particles and the cholesterol they carry, which promotes the formation and progression of atherosclerotic plaques in the artery. PCSK9 binds to hepatic LDLR to induce endocytosis and lysosomal degradation of LDLR in the liver cell, thereby reducing LDL-C uptake by LDLR. PCSK9 inhibitors have been clinically proven to reduce LDLR degradation by inhibiting PCSK9 expression/function and lower LDL-C levels in the general population.

[0006] However, there is still an unmet need in the art for LDL-C lowering treatments that have increased potency and/or durability of action.

### SUMMARY OF THE INVENTION

[0007] Provided herein are, inter alia, compounds that can inhibit expression of PCSK9 in a subject, for example, e.g., in liver cells of a subject.

[0008] In an aspect, the disclosure provides a double stranded RNAi (dsRNAi) agent comprising:
[0009] (i) a sense strand comprising a nucleotide sequence selected from SEQ ID Nos. 3 to 381;
[0010] (ii) an antisense strand forming a duplex with the sense strand and comprising a nucleotide sequence selected from SEQ ID Nos. 382 to 760.

[0011] In an aspect, the disclosure provides a double stranded RNAi (dsRNAi) agent comprising:
[0012] (i) a sense strand comprising a nucleotide sequence selected from SEQ ID Nos. 761 to 776;
[0013] (ii) an antisense strand forming a duplex with the sense strand and comprising a nucleotide sequence selected from SEQ ID Nos. 777 to 792.

[0014] In some embodiments, one or more nucleotides in the sense strand and the antisense strand are modified nucleotides. In some embodiments, all nucleotides in the sense strand and the antisense strand are modified nucleotides.

[0015] In some embodiments, each of the modified nucleotides independently comprises one or more modifications selected from a 2′-deoxy modification, a 2′-O-alkyl modification, a 2′-halo modification, a threofuranosyl nucleotide (TNA) modification, a 2′-5′-linkage modification, a conformationally restricting modification, an abasic modification, a 2′-amino-modification, a 2′-O-allyl modification, 2′-C-alkyl modification, a 2′-O-alkoxyalkyl modification, a morpholino modification, a phosphoramidate modification, a non-natural nucleobase modification, a modification in a tetrahydropyran, a modification containing a 1,5-anhydrohexitol, a modification containing a cyclohexenyl, a modification containing a phosphorothioate group, a modification containing a 5′-vinyl-phosphonate, a modification containing a 5′-phosphate, a modification to form a thermally destabilizing nucleotide, a glycol nucleic acid (GNA) modification, and a 2-O—(N-methylacetamide) modification.

[0016] In some embodiments, each of the modified nucleotides independently comprises one or more modifications selected from 2′-deoxy modification, 2′-O-alkoxyalkyl modification, 2′-O-alkyl modification, 2′-O-allyl modification, 2′-C-allyl modification, 2′-halo modification, modification containing a non-natural nucleobase, GNA modification, and TNA modification.

[0017] In some embodiments, the dsRNAi agent comprises a 3′-phosphorothioate (PS) modification.

[0018] In some embodiments, each of the modified nucleotides independently comprises one or more modifications selected from 2′-deoxy modification, 2′-O-methyl (2′-OMe) modification, 2′-fluoro (2′-F) modification, 2′-O-methoxyethyl (2′-MOE) modification, the modification containing a non-natural nucleobase, TNA, GNA, 3′-phosphorothioate (PS) modification, and 5′-vinyl-phosphonate (5′-VP) modification.

[0019] In some embodiments, the sense strand comprises one or two 2′-MOE modifications positioned at the 1st and/or 2nd nucleotides from the 5′ end.

[0020] In some embodiments, the sense strand comprises one or two 2′-MOE modifications positioned at the 1st and/or 2nd nucleotides from the 3′ end.

[0021] In some embodiments, the sense strand comprises one or two TNAs positioned at the 1st and/or 2nd nucleotides from the 5′ end.

[0022] In some embodiments, the sense strand comprises one or two TNAs positioned at the 1st and/or 2nd nucleotides from the 3′ end.

[0023] In some embodiments, the antisense strand comprises a 5′-VP modification at the 1st nucleotide from the 5′ end.

[0024] In some embodiments, the antisense strand comprises a 5′-VP-2′-OMe modification at the 1st position from the 5′ end.

[0025] In some embodiments, each of the sense strand and the antisense strand independently comprises two, three, four, five or six 2′-F modified nucleotides.

[0026] In some embodiments, the sense strand comprises one or two 3′-PS modifications at the 1st and/or 2nd nucleotides from the 5′ end.

[0027] In some embodiments, the sense strand comprises one or two 3′-PS modifications at the 1st and/or 2nd nucleotides from the 3′ end.

[0028] In some embodiments, the antisense strand comprises one or two 3′-PS modifications at the 1st and/or 2nd nucleotides from the 5′ end, and/or one or two 3′-PS modifications at the 1st and/or 2nd nucleotides from the 3′ end.

[0029] In certain aspects, the sense strand is 21 nucleotides in length and the antisense strand is 23 nucleotides in length.

[0030] In some embodiments, the sense strand comprises one to four 2′-MOE modifications positioned at the 1st, 2nd, 20th, and/or 21st nucleotides from the 5′ end.

[0031] In some embodiments, the sense strand does not comprise a 2′-MOE modification at the 3rd to 19th positions from the 5′ end.

[0032] In some embodiments, the sense strand comprises one to four TNAs positioned at the 1st, 2nd, 20th, and/or 21st nucleotides from the 5′ end.

[0033] In some embodiments, the sense strand does not comprise a 2′-MOE modifications and TNA at the 3rd to 19th positions from the 5′ end.

[0034] In some embodiments, the sense strand comprises two, three, or four 2′-F modifications positioned at the 7th, 9th, 10th, and/or 11th nucleotides from the 5′ end.

[0035] In some embodiments, the sense strand comprises one or two 2′-deoxy modifications positioned at the 10th and/or 11th nucleotides from the 5′ end.

[0036] In some embodiments, the sense strand comprises (i) 2′-F modifications positioned at the 7th, 9th, and 10th nucleotides from the 5′ end and (ii) a 2′-deoxy modification positioned at the 11th nucleotide from the 5′ end.

[0037] In some embodiments, the remaining nucleotides in the sense strand comprise 2′-OMe modifications.

[0038] In some embodiments, the antisense strand comprises a 5′-(E)-VP modification at the 1st nucleotide from the 5′ end.

[0039] In some embodiments, the antisense strand comprises a 5′-(E)-VP-2′-OMe modification at the 1st nucleotide from the 5′ end.

[0040] In some embodiments, the antisense strand comprises two, three, or four 2′-F modifications positioned at the 2nd, 6th, 14th, and/or 16th nucleotides from the 5′ end.

[0041] In some embodiments, the antisense strand comprises 2′-F modifications positioned at the 2nd, 6th, 14th, and 16th nucleotides from the 5′ end.

[0042] In some embodiments, the antisense strand comprises 2′-F modifications positioned at the 2nd, 6th, 14th, and 16th nucleotides from the 5′ end and a TNA positioned at the 3rd nucleotide from the 5′ end.

[0043] In some embodiments, the antisense strand comprises 2′-F modifications positioned at the 2nd, 6th, 14th, and 16th nucleotides from the 5′ end and a TNA, GNA or 2′-deoxy modification positioned at the 5th nucleotide from the 5′ end.

[0044] In some embodiments, the antisense strand comprises 2′-F modifications positioned at the 2nd, 14th, and 16th nucleotides from the 5′ end and a TNA, GNA or 2′-deoxy modification positioned at the 6th nucleotide from the 5′ end.

[0045] In some embodiments, the antisense strand comprises 2′-F modifications positioned at the 2nd, 6th, 14th, and 16th nucleotides and a TNA, GNA or 2′-deoxy modification positioned at the 7th nucleotide.

[0046] In some embodiments, the remaining nucleotides in antisense strand comprise 2′-OMe modified modifications.

[0047] In some embodiments, the sense strand comprises one to eight 3′-PS group at the 1st, 2nd, 3rd, 4th, 17th, 18th, 19th and/or 20th nucleotides from the 5′ end.

[0048] In some embodiments, the antisense strand comprises one to eight 3′-PS group at the 1st, 2nd, 3rd, 4th, 19th, 20th, 21st and/or 22nd nucleotides from the 5′ end.

[0049] In some embodiments, at least one of the 3′-PS groups in each sense strand and antisense strand has a stereopure Rp configuration.

[0050] In some embodiments, at least one of the 3′-PS groups in each sense strand and antisense strand has a stereopure Sp configuration.

[0051] In certain aspects, the double stranded RNAi (dsRNAi) agent comprises:
[0052] (a) a sense strand comprising SEQ ID NO: 800, and
   [0053] an antisense strand comprising SEQ ID NO: 853;
[0054] (b) a sense strand comprising SEQ ID NO: 801, and
   [0055] an antisense strand comprising SEQ ID NO: 854;
[0056] (c) a sense strand comprising SEQ ID NO: 806, and
   [0057] an antisense strand comprising SEQ ID NO: 859;
[0058] (d) a sense strand comprising SEQ ID NO: 811, and
   [0059] an antisense strand comprising SEQ ID NO: 864;
[0060] (e) a sense strand comprising SEQ ID NO: 813, and
   [0061] an antisense strand comprising SEQ ID NO: 866;
[0062] or
[0063] (f) a sense strand comprising SEQ ID NO: 830, and
   [0064] an antisense strand comprising SEQ ID NO: 883.

[0065] In some embodiments, the dsRNAi agent comprises a ligand.

[0066] In some embodiments, the ligand comprises a N-acetylgalactosamine (GalNAc) moiety.

[0067] In some embodiments, the ligand has a structure of:

[chemical structure]

[0068] wherein:
[0069] each L¹ is independently a linker which may be same or different in each occurrence;
[0070] L² is a linker;
[0071] n is an integer from 1 to 3; and
[0072] [symbol] is an attachment point to the sense strand or the antisense strand, or to a conjugate linker conjugated to the sense strand or the antisense strand.

[0073] In some embodiments, the ligand comprises the following structure of

[chemical structure]

[0074] wherein:
[0075] each p1, p2, p3, q1, q2, r1, r2 and r3 is independently an integer from 0 to 12;
[0076] each n1, n2, and n3 is independently an integer from 1 to 3; and
[0077] “*” is an attachment point to L².

[0078] In some embodiments, the ligand has a structure of:

[chemical structure]

[0079] wherein:
[0080] each L¹¹, L¹², L¹³, L¹⁴, and L¹⁵ is an independently a linker;
[0081] L² is a linker;
[0082] [symbol] is an attachment point to the sense strand or the antisense strand, or to a conjugate linker conjugated to the sense strand or the antisense strand.

[0083] In some embodiments, the ligand has a structure of:

[chemical structure]

[0084] wherein:
[0085] each p11 and q11 is independently an integer from 0 to 12;
[0086] each z1, z2, and z3 is independently an integer of 0 to 12; and
[0087] [symbol] is an attachment point to the sense strand or the antisense strand, or to a conjugate linker conjugated to the sense strand or the antisense strand.

[0088] In some embodiments, the ligand comprises the following structure:

[chemical structure]

[0089] wherein
[0090] [symbol] is an attachment point to the sense strand or the antisense strand or to a conjugate linker conjugated to the sense strand or the antisense strand.

[0091] In some embodiments, the ligand is conjugated to 3′ end of the sense strand to form the following structure:

[chemical structure]

wherein W is —OH or —SH.

[0092] In some embodiments, the ligand is conjugated to 5′ end of the sense strand to form the following structure:

[chemical structure]

[0093] or a pharmaceutically acceptable salt thereof, wherein W is —OH or —SH.

[0094] In some embodiments, W is —OH.

[0095] In an aspect, a double stranded RNAi (dsRNAi) agent comprises:
[0096] (a) a sense strand consisting of SEQ ID NO: 906, and
   [0097] an antisense strand consisting of SEQ ID NO: 963;
[0098] (b) a sense strand consisting of SEQ ID NO: 907, and
   [0099] an antisense strand consisting of SEQ ID NO: 964;
[0100] (c) a sense strand consisting of SEQ ID NO: 947, and
   [0101] an antisense strand consisting of SEQ ID NO: 1004;
[0102] (d) a sense strand consisting of SEQ ID NO: 948, and
   [0103] an antisense strand consisting of SEQ ID NO: 1005;
[0104] (e) a sense strand consisting of SEQ ID NO: 949, and
   [0105] an antisense strand consisting of SEQ ID NO: 1006;
[0106] or
[0107] (f) a sense strand consisting of SEQ ID NO: 950, and
   [0108] an antisense strand consisting of SEQ ID NO: 1007;
[0109] wherein the ligand (L96) is conjugated to the 3′ end of the sense strand to form the following schematic:

[chemical structure]

[0110] or a pharmaceutically acceptable salt thereof, wherein W is —OH.

[0111] In some embodiments, the dsRNAi agent is in a pharmaceutically acceptable salt form.

[0112] In some embodiments, the pharmaceutically acceptable salt is a sodium salt.

[0113] In an aspect, the disclosure provides a pharmaceutical composition comprising the dsRNAi agent as described herein, or a pharmaceutically acceptable salt thereof, and a pharmaceutically acceptable carrier.

[0114] In some embodiments, the composition is in an aqueous solution form.

[0115] In an aspect, the disclosure provides a method of inhibiting PCSK9 expression in a cell, the method comprising:
[0116] (a) contacting the cell with the dsRNAi agent as described herein or a pharmaceutically acceptable salt thereof, or the pharmaceutical composition as described herein; and
[0117] (b) maintaining the cell produced in step (a) for a time sufficient to obtain degradation of the mRNA transcript of a PCSK9 gene, thereby inhibiting expression of the PCSK9 gene in the cell.

[0118] In an aspect, the disclosure provides a method of lowering a level of low-density lipoprotein cholesterol (LDL-C) in a subject in need thereof, comprising administering to the subject the dsRNAi agent as described herein or a pharmaceutically acceptable salt thereof, or the pharmaceutical composition as described herein.

[0119] In an aspect, the disclosure provides a method of treating lipidemia mediated by PCSK9 expression in a subject in need thereof, comprising administering to the subject the dsRNAi agent as described herein or a pharmaceutically acceptable salt thereof, or the pharmaceutical composition as described herein.

[0120] In an aspect, the disclosure provides a method of treating or preventing atherosclerotic cardiovascular disease (ASCVD) in a subject in need thereof, comprising administering to the subject the dsRNAi agent as described herein, or a pharmaceutically acceptable salt thereof, or the pharmaceutical composition as described herein.

[0121] In an aspect, the disclosure provides a method of reducing or preventing cardiovascular event in a subject in need thereof, comprising administering to the subject the dsRNAi agent as described herein or a pharmaceutically acceptable salt thereof, or the pharmaceutical composition as described herein.

[0122] In some embodiments, the cardiovascular event is cardiovascular death, non-fatal myocardial infarction (MI), non-fatal ischemic stroke, urgent coronary revascularization, coronary heart disease (CHD) death, or any combination thereof.

[0123] In an aspect, the disclosure provides a method of reducing or preventing a major limb adverse event (MALE) in a subject in need thereof, comprising administering to the subject the dsRNAi agent as described herein or a pharmaceutically acceptable salt thereof, or the pharmaceutical composition as described herein.

[0124] In some embodiments, the MALE is acute lower limb ischemia, lower limb amputation due to ischemia, urgent lower limb revascularization for ischemia, or any combination thereof.

[0125] In an aspect, the disclosure provides a method of inhibiting PCSK9 expression in a cell, the method comprising:
[0126] (i) contacting the cell with a dsRNAi agent, wherein the dsRNAi agent comprises:
   [0127] (a) a sense strand comprising SEQ ID NO: 800, and
      [0128] an antisense strand comprising SEQ ID NO: 853;
   [0129] (b) a sense strand comprising SEQ ID NO: 801, and
      [0130] an antisense strand comprising SEQ ID NO: 854;
   [0131] (c) a sense strand comprising SEQ ID NO: 806, and
      [0132] an antisense strand comprising SEQ ID NO: 859;
   [0133] (d) a sense strand comprising SEQ ID NO: 811, and
      [0134] an antisense strand comprising SEQ ID NO: 864;
   [0135] (e) a sense strand comprising SEQ ID NO: 813, and
      [0136] an antisense strand comprising SEQ ID NO: 866;
   [0137] or
   [0138] (f) a sense strand comprising SEQ ID NO: 830, and
      [0139] an antisense strand comprising SEQ ID NO: 883,
[0140] (ii) maintaining the cell produced in step (a) for a time sufficient to obtain degradation of the mRNA transcript of a PCSK9 gene, thereby inhibiting expression of the PCSK9 gene in the cell.

[0141] In an aspect, the disclosure provides a method of lowering a level of low-density lipoprotein cholesterol (LDL-C) in a subject in need thereof, comprising administering to the subject a dsRNAi agent, wherein the dsRNAi agent comprises:
[0142] (a) a sense strand comprising SEQ ID NO: 800, and
   [0143] an antisense strand comprising SEQ ID NO: 853;
[0144] (b) a sense strand comprising SEQ ID NO: 801, and
   [0145] an antisense strand comprising SEQ ID NO: 854;
[0146] (c) a sense strand comprising SEQ ID NO: 806, and
   [0147] an antisense strand comprising SEQ ID NO: 859;
[0148] (d) a sense strand comprising SEQ ID NO: 811, and
   [0149] an antisense strand comprising SEQ ID NO: 864;
[0150] (e) a sense strand comprising SEQ ID NO: 813, and
   [0151] an antisense strand comprising SEQ ID NO: 866;
[0152] or
[0153] (f) a sense strand comprising SEQ ID NO: 830, and
   [0154] an antisense strand comprising SEQ ID NO: 883.

[0155] In an aspect, the disclosure provides a method of treating lipidemia mediated by PCSK9 expression in a subject in need thereof, comprising administering to the subject a dsRNAi agent, wherein the dsRNAi agent comprises:
[0156] (a) a sense strand comprising SEQ ID NO: 800, and
   [0157] an antisense strand comprising SEQ ID NO: 853;
[0158] (b) a sense strand comprising SEQ ID NO: 801, and
   [0159] an antisense strand comprising SEQ ID NO: 854;
[0160] (c) a sense strand comprising SEQ ID NO: 806, and
   [0161] an antisense strand comprising SEQ ID NO: 859;
[0162] (d) a sense strand comprising SEQ ID NO: 811, and
   [0163] an antisense strand comprising SEQ ID NO: 864;
[0164] (e) a sense strand comprising SEQ ID NO: 813, and
   [0165] an antisense strand comprising SEQ ID NO: 866;
[0166] or
[0167] (f) a sense strand comprising SEQ ID NO: 830, and
   [0168] an antisense strand comprising SEQ ID NO: 883.

[0169] In an aspect, the disclosure provides a method of treating or preventing atherosclerotic cardiovascular disease (ASCVD) in a subject in need thereof, comprising administering to the subject a dsRNAi agent, wherein the dsRNAi agent comprises:
[0170] (a) a sense strand comprising SEQ ID NO: 800, and
   [0171] an antisense strand comprising SEQ ID NO: 853;
[0172] (b) a sense strand comprising SEQ ID NO: 801, and
   [0173] an antisense strand comprising SEQ ID NO: 854;
[0174] (c) a sense strand comprising SEQ ID NO: 806, and
   [0175] an antisense strand comprising SEQ ID NO: 859;
[0176] (d) a sense strand comprising SEQ ID NO: 811, and
   [0177] an antisense strand comprising SEQ ID NO: 864;
[0178] (e) a sense strand comprising SEQ ID NO: 813, and
   [0179] an antisense strand comprising SEQ ID NO: 866;
[0180] or
[0181] (f) a sense strand comprising SEQ ID NO: 830, and
   [0182] an antisense strand comprising SEQ ID NO: 883.

[0183] In an aspect, the disclosure provides a method of reducing or preventing cardiovascular event in a subject in need thereof, comprising administering to the subject a dsRNAi agent, wherein the dsRNAi agent comprises:
[0184] (a) a sense strand comprising SEQ ID NO: 800, and
   [0185] an antisense strand comprising SEQ ID NO: 853;
[0186] (b) a sense strand comprising SEQ ID NO: 801, and
   [0187] an antisense strand comprising SEQ ID NO: 854;
[0188] (c) a sense strand comprising SEQ ID NO: 806, and
   [0189] an antisense strand comprising SEQ ID NO: 859;
[0190] (d) a sense strand comprising SEQ ID NO: 811, and
   [0191] an antisense strand comprising SEQ ID NO: 864;
[0192] (e) a sense strand comprising SEQ ID NO: 813, and
   [0193] an antisense strand comprising SEQ ID NO: 866;
[0194] or
[0195] (f) a sense strand comprising SEQ ID NO: 830, and
   [0196] an antisense strand comprising SEQ ID NO: 883.

[0197] In some embodiments, the cardiovascular event is cardiovascular death, non-fatal myocardial infarction (MI), non-fatal ischemic stroke, urgent coronary revascularization, coronary heart disease (CHD) death, or any combination thereof.

[0198] In an aspect, the disclosure provides a method of reducing or preventing a major limb adverse event (MALE) in a subject in need thereof, comprising administering to the subject a dsRNAi agent, wherein the dsRNAi agent comprises:
[0199] (a) a sense strand comprising SEQ ID NO: 800, and
   [0200] an antisense strand comprising SEQ ID NO: 853;
[0201] (b) a sense strand comprising SEQ ID NO: 801, and
   [0202] an antisense strand comprising SEQ ID NO: 854;
[0203] (c) a sense strand comprising SEQ ID NO: 806, and
   [0204] an antisense strand comprising SEQ ID NO: 859;
[0205] (d) a sense strand comprising SEQ ID NO: 811, and
   [0206] an antisense strand comprising SEQ ID NO: 864;
[0207] (e) a sense strand comprising SEQ ID NO: 813, and
   [0208] an antisense strand comprising SEQ ID NO: 866;
[0209] or
[0210] (f) a sense strand comprising SEQ ID NO: 830, and
   [0211] an antisense strand comprising SEQ ID NO: 883.

[0212] In some embodiments, the MALE is acute lower limb ischemia, lower limb amputation due to ischemia, urgent lower limb revascularization for ischemia, or any combination thereof.

[0213] In some embodiments, the dsRNAi agent further comprises a ligand comprising the following structure:

[chemical structure]

[0214] wherein
[0215] [symbol] is an attachment point to the sense strand or the antisense strand or to a conjugate linker conjugated to the sense strand or the antisense strand.

[0216] In some embodiments, the subject is a human.

[0217] In some embodiments, the subject has or is diagnosed with hyperlipidemia, hypercholesterolemia, hypertriglyceridemia, mixed hyperlipidemia, congestive heart disease (CHD) or atherosclerosis.

[0218] In some embodiments, the dsRNAi agent or the pharmaceutical composition is administered to the subject subcutaneously or intravenously.

[0219] In an aspect, the disclosure provides a kit comprising the dsRNAi agent as described herein, or a pharmaceutically acceptable salt thereof, or the pharmaceutical composition as described herein.

[0220] In some embodiments, the kit further comprises an applicator.

[0221] In some embodiments, the applicator is a syringe.

[0222] In some embodiments, the applicator is a pre-filled syringe.

[0223] Other aspects of the invention are disclosed infra.

### BRIEF DESCRIPTION OF DRAWINGS

[0224] FIGS. 1A-1B. Effects of a single 3 mg/kg subcutaneous administration of PCSK9 siRNAs D1, D2, D3, D4, D5, or D6 to humanized PCSK9 mice on (FIG. 1A) plasma PCSK9 levels over time and (FIG. 1A) liver human PCSK9 mRNA level, liver siRNA level, and liver RISC loading (i.e., the level of siRNA incorporated into RISC) on day 56 post-dose.

[0225] FIGS. 2A-2B. Effects of a single 3 mg/kg subcutaneous administration of PCSK9 siRNAs D7, D8, D9, or D10 to humanized PCSK9 mice on (FIG. 3A) plasma PCSK9 levels over time and (FIG. 3B) liver human PCSK9 mRNA level, liver siRNA level, and liver RISC loading (i.e., the level of siRNA incorporated into RISC) on day 77post-dose.

[0226] FIGS. 3A-3B. Effects of a single 3 mg/kg subcutaneous administration of PCSK9 siRNAs D1, D4, D11, or D12 to humanized PCSK9 mice on (FIG. 3A) plasma PCSK9 levels over time and (FIG. 3B) liver human PCSK9 mRNA level, liver siRNA level, and liver RISC loading (i.e., the level of siRNA incorporated into RISC) on day 63 post-dose.

[0227] FIGS. 4A-4B. Effects of a single 3 mg/kg subcutaneous administration of PCSK9 siRNAs D4, D14, D15, D16, or D17 to humanized PCSK9 mice on (FIG. 4A) plasma PCSK9 levels over time and (FIG. 4B) liver human PCSK9 mRNA level, liver siRNA level, and liver RISC loading (i.e., the level of siRNA incorporated into RISC) on day 77 post-dose.

[0228] FIGS. 5A-5B. Effects of a single 3 mg/kg subcutaneous administration of PCSK9 siRNAs D4, D18, D19, D20, D21, D22, or D23 to humanized PCSK9 mice on (FIG. 5A) plasma PCSK9 levels over time and (FIG. 5B) liver human PCSK9 mRNA level, liver siRNA level, and liver RISC loading (i.e., the level of siRNA incorporated into RISC) on day 77 post-dose.

[0229] FIGS. 6A-6B. Effects of a single 3 mg/kg subcutaneous administration of PCSK9 siRNAs D4, D13, D24, D25, D26, D27, or D28 to humanized PCSK9 mice on (FIG. 6A) plasma PCSK9 levels over time and (FIG. 6B) liver human PCSK9 mRNA level, liver siRNA level, and liver RISC loading (i.e., the level of siRNA incorporated into RISC) on day 63 post-dose.

[0230] FIGS. 7A-7B. Effects of a single 3 mg/kg subcutaneous administration of PCSK9 siRNAs D25, D29, D30, D31, D32, D33, or D34 to humanized PCSK9 mice on (FIG. 7A) plasma PCSK9 levels over time and (FIG. 7B) liver human PCSK9 mRNA level, liver siRNA level, and liver RISC loading (i.e., the level of siRNA incorporated into RISC) on day 64 post-dose.

[0231] FIGS. 8A-8B. Effects of a single 3 mg/kg subcutaneous administration of PCSK9 siRNAs D4, D15, D35, D36, D37, or D38 to humanized PCSK9 mice on (FIG. 8A) plasma PCSK9 levels over time and (FIG. 8B) liver human PCSK9 mRNA level, liver siRNA level, and liver RISC loading (i.e., the level of siRNA incorporated into RISC) on day 77 post-dose.

[0232] FIG. 9 shows example PCSK9 siRNA compounds (dsRNAi agents) as described herein. Figure discloses SEQ ID NOS 963, 906, 964, 907, 1004, 947, 1005, 948, 1006, 949, 1007, and 950, respectively, in order of appearance (from top to bottom).

[0233] FIGS. 10A-10C. Effects of a single 3 mg/kg subcutaneous administration of PCSK9 siRNAs D15, D38, D39, D40, D41, D42, D43, D44, D45, D46, D47, or D48 to humanized PCSK9 mice on plasma PCSK9 levels over time (FIGS. 10A-10B) and liver siRNA level and liver RISC loading (i.e., the level of siRNA incorporated into RISC) on day 77 post-dose (FIG. 10C).

[0234] FIGS. 11A-11B. Effects of a single 3 mg/kg subcutaneous administration of PCSK9 siRNAs D4, D19, D49, or D50 to humanized PCSK9 mice on plasma PCSK9 levels over time (FIG. 11A) and liver human PCSK9 mRNA level, liver siRNA level, and liver RISC loading (i.e., the level of siRNA incorporated into RISC) on day 77 post-dose (FIG. 11B).

[0235] FIGS. 12A-12C. Effects of a single subcutaneous administration of PCSK9 siRNAs D7 (3 or 6 mg/kg), D8 (3 or 6 mg/kg), D51 (3 mg/kg), D52 (3 mg/kg), D53 (3 mg/kg), or D54 (1, 3, or 6 mg/kg) to humanized PCSK9 mice on plasma PCSK9 levels over time (FIGS. 12A-12B) and liver human PCSK9 mRNA level, liver siRNA level, and liver RISC loading (i.e., the level of siRNA incorporated into RISC) on day 77 post-dose (FIG. 12C).

[0236] FIGS. 13A-13C. Effects of a single 3 mg/kg subcutaneous administration of PCSK9 siRNAs D38, D55, D42, D43, D44, D56, D57, D58, or D59 to humanized PCSK9 mice on plasma PCSK9 levels over time (FIGS. 13A-13B) and liver human PCSK9 mRNA level, liver siRNA level, and liver RISC loading (i.e., the level of siRNA incorporated into RISC) on day 77 post-dose (FIG. 13C).

[0237] FIGS. 14A-14B. Effects of a single 0.3, 1, or 3 mg/kg subcutaneous administration of PCSK9 siRNAs D7 or D52 to humanized PCSK9 mice on plasma PCSK9 levels over time (FIG. 14A) and liver human PCSK9 mRNA level, liver siRNA level, and liver RISC loading (i.e., the level of siRNA incorporated into RISC) on day 77 post-dose (FIG. 14B).

[0238] FIGS. 15A-15B. Effects of a single 3 mg/kg subcutaneous administration of PCSK9 siRNAs D52, D60, D61, or D62 to humanized PCSK9 mice on plasma PCSK9 levels over time (FIG. 15A) and liver siRNA level and liver RISC loading (i.e., the level of siRNA incorporated into RISC) on day 77 post-dose (FIG. 15B).

[0239] FIG. 16. Effects of a single 3 mg/kg subcutaneous administration of PCSK9 siRNAs D8 or D63 to humanized PCSK9 mice on plasma PCSK9 levels over time.

[0240] FIG. 17. Effects of PCSK9 siRNAs D7, D8, or D52 transfection at various concentrations into cultured Hep3B cells on PCSK9 mRNA levels.

[0241] FIG. 18. Results of in vitro specificity profiling of the PCSK9 siRNAs D52, D60, D61, or D62 in Hep3B cells.

[0242] FIGS. 19A-19B. Effects of a single 3 mg/kg subcutaneous administration of PCSK9 siRNAs D8, D51, D52, D53, or D54 to obese cynomolgus monkeys on plasma PCSK9 levels over time (FIG. 19A) and serum low density lipoprotein cholesterol (LDL-C) levels over time (FIG. 19B).

### DETAILED DESCRIPTION

### Definitions

[0243] Unless defined otherwise, all technical terms, scientific terms, abbreviations, chemical structures, and chemical formulae used herein have the same meaning as is commonly understood by one of ordinary skill in the art. The chemical structures and formulae set forth herein are constructed according to the standard rules of chemical valency known in the chemical arts. All patents, applications, published applications, and other publications referenced herein are incorporated by reference in their entirety unless stated otherwise.

[0244] All patents, applications, published applications, and other publications referenced herein are incorporated by reference in their entirety unless stated otherwise. Unless otherwise indicated, conventional methods of mass spectroscopy, NMR, HPLC, protein chemistry, biochemistry, recombinant DNA techniques, and pharmacology are employed.

[0245] Furthermore, use of the term “including” as well as other forms, such as “include”, “includes,” and “included,” is not limiting. As used in this specification, whether in a transitional phrase or in the body of the claim, the terms “comprise(s)” and “comprising” are to be interpreted as having an open-ended meaning. That is, the terms are to be interpreted synonymously with the phrases “having at least” or “including at least.” When used in the context of a process, the term “comprising” means that the process includes at least the recited steps, but may include additional steps. When used in the context of a compound, composition, or device, the term “comprising” means that the compound, composition, or device includes at least the recited features or components, but may also include additional features or components. As used herein, the term “a,” “an,” “the” and similar terms used in the context of the present invention (especially in the context of the claims) are to be construed to cover both the singular and plural unless otherwise indicated herein or clearly contradicted by the context.

[0246] Unless otherwise indicated, all numbers, values, and/or expressions referring to nucleotide lengths, inhibition, activities, dosages, contents, and formulations used herein are to be understood as modified in all instances by the term “about” as such numbers are inherently approximations that are reflective of, among other things, the various uncertainties of measurement encountered in obtaining such values. Further, unless specifically stated or obvious from context, as used herein, the term “about” is understood as within a range of normal tolerance in the art, for example within 2 standard deviations of the “mean. “About” may be understood as within 10%, 9%, 8%, 7%, 6%, 5%, 4%, 3%, 2%, 1%, 0.5%, 0.1%, 0.05%, or 0.01% of the stated value. Unless otherwise clear from the context, all numerical values provided herein are modified by the term “about.”

[0247] The term “nucleic acid” means a compound containing at least two nucleotide monomers covalently linked together. Nucleic acids include polynucleotides and oligonucleotides, including double-stranded oligonucleotides and single-stranded oligonucleotides, and modified versions thereof.

[0248] The term “nucleotide” means a compound including a nucleoside and a phosphate group (or phosphodiester linkage) that are covalently attached at 5′ position or 3′ position of the pentofuranosyl sugar (e.g., ribose or deoxyribose). In certain aspects, the nucleotide is a ribonucleotide (RNA) having the ribose as the pentofuranosyl sugar. In certain aspects, a nucleotide is a deoxyribonucleotide (DNA) having the deoxyribose (2′-deoxyribose) as the pentofuranosyl sugar. Unless otherwise specifically indicated, when referring a “nucleotide” in a chain of nucleotides (e.g., oligonucleotides), e.g., X₁ to X₂₁ and X_{1′} to X_{23′}, a nucleotide is meant by a nucleoside and a phosphate group (or phosphodiester linkage) that is covalently attached at 3′ position of the pentofuranosyl sugar (e.g., ribose or deoxyribose).

[0249] The term “nucleoside” means a monomer consisting of a nucleobase and a pentofuranosyl sugar (e.g., ribose or deoxyribose). A nucleoside including a ribose sugar ring has to a structure of

[chemical structure]

or a pharmaceutically acceptable salt thereof, and a nucleotide including a deoxyribose sugar ring has a structure of

[chemical structure]

or a pharmaceutically acceptable salt, wherein in each structure, “Base” is a nucleobase.

[0250] The term “nucleobase” or “base,” as used herein, means the heterocyclic base moiety of a nucleoside or nucleotide. Non-limiting examples of nucleobases includes cytosine or a derivative thereof (e.g., cytosine analogue), guanine or a derivative thereof (e.g., guanine analogue), adenine or a derivative thereof (e.g., adenine analogue), thymine or a derivative thereof (e.g., thymine analogue), uracil or a derivative thereof (e.g., uracil analogue), hypoxanthine or a derivative thereof (e.g., hypoxanthine analogue), xanthine or a derivative thereof (e.g., xanthine analogue), 7-methylguanine or a derivative thereof (e.g., 7-methylguanine analogue), deaza-adenine or a derivative thereof (e.g., deaza-adenine analogue), deaza-guanine or a derivative thereof (e.g., deaza-guanine), deaza-hypoxanthine or a derivative thereof, 5,6-dihydrouracil or a derivative thereof (e.g., 5,6-dihydrouracil analogue), 5-methylcytosine or a derivative thereof (e.g., 5-methylcytosine analogue), or 5-hydroxymethylcytosine or a derivative thereof (e.g., 5-hydroxymethylcytosine analogue) moieties. In some embodiments, the nucleobase is adenine, guanine, hypoxanthine, xanthine, theobromine, caffeine, uric acid, or isoguanine, which may be optionally substituted or modified. In some embodiments, the nucleobase is

[chemical structure]

which may be optionally substituted or modified, wherein “ [symbol] ” denotes the point of attachment to a pentofuranosyl sugar ring (e.g., 1′ position).

[0251] The term “phosphate,” or “phosphate group” as used herein a chemical species made of one phosphorus atom and four oxygen atoms

[chemical structure]

or esters, salts, or acids thereof. In certain aspects, when the phosphate groups are positioned between adjacent nucleosides in RNA or DNA strand and form a “backbone” of the oligonucleotides, these terms “phosphate,” or “phosphate group” may be interchangeable used as “phosphate group,” “phosphate linkage,” “phosphodiester linkage,” or “linkage.” For example, the phosphate or phosphodiester linkage in the backbone of RNA or DNA may have the structures of

[chemical structure]

or esters, salts (e.g., pharmaceutically acceptable salts), or acids

[chemical structure]

thereof, wherein “ [symbol] ” denotes the point of attachment to pentofuranosyl sugar rings (e.g., 5′ and 3′ positions) in adjacent nucleosides. In certain aspects, a variant of a phosphate or phosphodiester linkage, e.g., phosphorothioate (PS) linkage, can replace a phosphate group (or phosphodiester linkage) in the backbone and connect two adjacent nucleosides. In certain aspects, a variant of a phosphate or phosphodiester linkage, e.g., phosphorothioate (PS) linkage or vinyl phosphonate (VP) group, may be additionally attached at 3′ end or 5′ end of the oligonucleotides (e.g., RNA or DNA), e.g., 3′-OH or 5′-OH position of the terminal pentofuranosyl sugar (e.g., ribose or deoxyribose), so as to act as chemically or biologically functional group. In certain aspects, a variant of phosphate or phosphodiester linkage may also be referred as a phosphorus-derived internucleoside linkage that includes at least one phosphorus atom in the backbone.

[0252] Unless otherwise indicated herein, an unmodified RNA (or “ribonucleotide”) in a chain of nucleotides (e.g., mRNA, rRNA, or sense strand or antisense strand of siRNA) as disclosed refers to a structure of

[chemical structure]

or a pharmaceutically acceptable salt thereof. Likewise, an unmodified DNA (or “deoxyribonucleotides”) in a chain of nucleotides (e.g., genomic DNA or cDNA) as disclosed herein specifically refers to a structure of

[chemical structure]

or a pharmaceutically acceptable salt thereof. In each structure “Base” is a nucleobase and [symbol] is an attachment point to the adjacent nucleotides.

[0253] Unless otherwise indicated herein, when an unmodified RNA is the first nucleotide from the 5′ end of an RNA chain (e.g., mRNA, or sense strand or antisense strand of siRNA), that nucleotide has a structure of

[chemical structure]

or a pharmaceutically acceptable salt thereof. Likewise, when an unmodified DNA is the first nucleotide from the 5′ end of a DNA chain (e.g., genomic DNA or cDNA), that nucleotide has a structure of

[chemical structure]

or a pharmaceutically acceptable salt thereof. In each structure “Base” is a nucleobase and [symbol] is an attachment point (5′ oxygen) to the adjacent nucleotides. Alternatively but equivalently, for example, the first nucleotide from the 5′ end of an RNA chain (e.g., mRNA, or sense strand or antisense strand of siRNA), that nucleotide has a structure of

[chemical structure]

or a pharmaceutically acceptable salt thereof and the first nucleotide from the 5′ end of a DNA chain (e.g., genomic DNA or cDNA), that nucleotide has a structure of

[chemical structure]

or a pharmaceutically acceptable salt thereof, when [symbol] is an attachment point (5′ oxygen) to the adjacent nucleotides.

[0254] Unless otherwise indicated herein, when an unmodified RNA is the first nucleotide from the 3′ end of an RNA chain (e.g., mRNA, or sense strand or antisense strand of siRNA), that nucleotide has a structure of

[chemical structure]

or a pharmaceutically acceptable salt. Likewise, when an unmodified DNA is the first nucleotide from the 3′ end of a DNA chain (e.g., genomic DNA or cDNA), that nucleotide has a structure of

[chemical structure]

or a pharmaceutically acceptable salt thereof. In certain embodiments, when an unmodified RNA is the first nucleotide from the 3′ end of an RNA chain (e.g., mRNA, or sense strand or antisense strand of siRNA) that nucleotide does not include 3′ end phosphate group or phosphodiester linkage, for example, which has been removed during hydrolysis or synthesis, has a structure of

[chemical structure]

or a pharmaceutically acceptable salt. Likewise, when an unmodified DNA is the first nucleotide from the 3′ end of a DNA chain (e.g., genomic DNA or cDNA), that nucleotide does not include 3′ end phosphate group, for example, which has been removed during hydrolysis or synthesis, has a structure of

[chemical structure]

or a pharmaceutically acceptable salt thereof. In each structure “Base” is a nucleobase and [symbol] is an attachment point (e.g., phosphorus of the phosphate linkage) to the adjacent nucleotides.

[0255] A code “A”, “G”, “C”, or “U” presented in a sequence list as disclosed herein stand for a RNA nucleotide that contains adenine, guanine, cytosine, or uracil as a base, respectively. A code “dA”, “dG”, “dC” or “dT” presented in a sequence list as disclosed herein stand for a DNA nucleotide that contains adenine, guanine, cytosine, and thymine as a base, respectively. In some embodiments, the code “T” may be present in a RNA sequence then it may refer to a nucleotide (e.g. modified nucleotide) that thymine as a base.

[0256] The term “oligonucleotide” means a shorter length nucleic acid, e.g. of less than 100 nucleotides in length. Oligonucleotides may be single-stranded or double-stranded. In some embodiments, an oligonucleotide may include naturally occurring ribonucleotides, naturally occurring deoxyribonucleotides, and/or nucleotides having one or more modifications to a naturally occurring terminus, sugar, nucleobase, and/or internucleoside linkage. Non-limiting examples of oligonucleotides include double-stranded oligonucleotides (e.g., dsRNA), single-stranded oligonucleotides (e.g., single stranded RNA or ssRNA), antisense oligonucleotides (“ASO”), small interfering RNA (siRNA), microRNA mimics, short hairpin RNAs (shRNA), single-strand small interfering RNA (ssRNAi), RNaseH oligonucleotides, anti-microRNA oligonucleotides, steric blocking oligonucleotides, exon-skipping oligonucleotides, CRISPR guide RNAs, and aptamers. In certain aspects, the oligonucleotide is a dsRNA and each strand has a length less than 100 nucleotides (“nt”), less than 90 nt, less than 80 nt, less than 70 nt, less than 60 nt, less than 50 nt, less than 40 nt, less than 35 nt, less than 30 nt, less than 28 nt, less than 26 nt, less than 25 nt, less than 24 nt, less than 23 nt, less than 22 nt, less than 21 nt, less than 20 nt, less than 19 nt, less than 18 nt, less than 17 nt, less than 16 nt, or 15 nt.

[0257] The terms “iRNA”, “RNAi agent,” “iRNA agent,”, “RNA interference agent” as used interchangeably herein, refer to an agent that contains RNA as that term is defined herein, and which mediates the targeted cleavage of an RNA transcript (mRNA) via an RNA-induced silencing complex (RISC) pathway. An RNAi agent directs the sequence-specific degradation of mRNA through a process and thereafter inhibits expression of the gene encoded by the mRNA in a cell in vivo, e.g., in a subject (e.g., any vertebrate, mammal, or human).

[0258] The term “small interfering RNA” or “siRNA” means a double-stranded oligonucleotide (dsRNA) formed with two anti-parallel, and partially, substantially or fully complementary nucleic acid strands (e.g., a first strand and a second strand; or a “sense” strand and an “antisense” strand), which interferes with the expression of genes in a sequence-specific manner by facilitating mRNA degradation before translation through the RNA interference pathway. In some embodiments, depending on the context, the first strand can be a “guide” or antisense strand, and the second strand can be a “passenger” or sense strand. In some embodiments, depending on the context, the “first” strand can be a passenger or sense strand, and the “second” strand can be a guide or antisense. In certain aspects, an “RNAi agent” or “siRNA agent,” as used herein, refers a double-stranded RNA (dsRNA) with or without a ligand or other conjugate, and may be interchangeably used with a term “double stranded RNAi agent (dsRNAi agent),” or “dsRNA agent.” In certain aspects of the disclosure, the term “siRNA” can be used to describe a dsRNA with specific nucleotide sequences (unmodified or modified nucleotide sequences), without a ligand or other conjugate.

[0259] The term “antisense strand,” as used herein, refers an oligonucleotide (e.g., RNA) of an siRNA or a dsRNAi that is complementary (e.g., partially, substantially, or fully complementary) to the target mRNA and is incorporated into the RNA-induced silencing complex (RISC) to direct gene silencing in a sequence-specific manner through the RNA interference pathway. An antisense strand may also be referred to as the “guide strand.” In some embodiments, the antisense strand may have a length from 15-30 nt, 15-26 nt, 15-23 nt, 15-22 nt, 15-21 nt, 15-20 nt, 15-19 nt, 15-18 nt, 15-17 nt, 18-30 nt, 18-26 nt, 18-23 nt, 18-22 nt, 18-21 nt, 18-20 nt, 19-30 nt, 19-26 nt, 19-23 nt, 19-22 nt, 19-21 nt, 19-20 nt, 19 nt, 20-30 nt, 20-26 nt, 20-25 nt, 20-24 nt, 20-23 nt, 20-22 nt, 20-21 nt, 20 nt, 21-30 nt, 21-26 nt, 21-25 nt, 21-24 nt, 21-23 nt, 21-22 nt, 9 nt, 10 nt, 11 nt, 12 nt, 13 nt, 14 nt, 15 nt, 16 nt, 17 nt, 18 nt, 19 nt, 20 nt, 21 nt, 22 nt, 23 nt, 24 nt, 25 nt, 26 nt, 27 nt, 28 nt, 29 nt, 30 nt, 31 nt, 32 nt, 33 nt, 34 nt, 35 nt, or 36 nt.

[0260] The term “sense strand,” as used herein, refers an oligonucleotide that is complementary (e.g., partially, substantially, or fully complementary) to the antisense strand. The sense strand is typically degraded following incorporation of the antisense strand into RISC. The sense strand may also be referred to as the “passenger strand.” In some embodiments, the sense strand may have a length from 15-30 nt, 15-26 nt, 15-23 nt, 15-22 nt, 15-21 nt, 15-20 nt, 15-19 nt, 15-18 nt, 15-17 nt, 18-30 nt, 18-26 nt, 18-23 nt, 18-22 nt, 18-21 nt, 18-20 nt, 19-30 nt, 19-26 nt, 19-23 nt, 19-22 nt, 19-21 nt, 19-20 nt, 19 nt, 20-30 nt, 20-26 nt, 20-25 nt, 20-24 nt, 20-23 nt, 20-22 nt, 20-21 nt, 20 nt, 21-30 nt, 21-26 nt, 21-25 nt, 21-24 nt, 21-23 nt, 21-22 nt, 9 nt, 10 nt, 11 nt, 12 nt, 13 nt, 14 nt, 15 nt, 16 nt, 17 nt, 18 nt, 19 nt, 20 nt, 21 nt, 22 nt, 23 nt, 24 nt, 25 nt, 26 nt, 27 nt, 28 nt, 29 nt, 30 nt, 31 nt, 32 nt, 33 nt, 34 nt, 35 nt, or 36 nt.

[0261] The term “complementary” means that a nucleotide (e.g., RNA or DNA) or a sequence of nucleotides are capable of base pairing non-covalently via hydrogen bonding with another nucleotide or sequence of nucleotides. As described herein and commonly known in the art the complementary (matching) nucleotide of adenosine is thymidine or uridine and the complementary (matching) nucleotide of guanosine is cytidine. The complementarity of sequences may be partial, in which only some of the nucleic acids match according to base pairing, or complete, where all the nucleic acids match according to base pairing. For example, two sequences that are complementary to each other, may have a specified percentage of nucleotides that participate in nucleobase-pairing (i.e., about 50% complementarity, preferably 50%, 55%, 65%, 70%, 75%, 80%, 85%, 90%, 91%, 92%, 93%, 94%, 95%, 96%, 97%, 98%, 99%, or greater complementarity over a specified region). In some embodiments, two sequences are partially complementary when the percentage of nucleotides that participate in nucleobase-pairing is about 50%, about 55%, about 65%, about 70%, about 75%, or about 80%, or ranges from about 50% to about 80%. In some embodiments, two sequences are substantially complementary when the percentage of nucleotides that participate in nucleobase-pairing is about 80%, about 81%, about 82%, about 83%, about 84%, about 85%, about 86%, about 87%, about 88%, about 89%, about 90%, about 91%, about 92%, about 92%, about 93%, about 94%, or about 95%, or ranges from about 80% to about 95%.

[0262] Examples of complementary (e.g., partially, substantially, or fully complementary) sequences are sense and antisense sequences, wherein the sense sequence contains complementary (e.g., partially, substantially, or fully complementary) nucleotides to the antisense sequence and thus forms the complement of the antisense sequence. In certain aspects, a sense strand and an antisense strand of a double-stranded oligonucleotide (e.g., double stranded RNA) are substantially or fully complementary over their entire lengths. In some embodiments, a sense strand and an antisense strand of dsRNA are substantially or fully complementary over the entire length of the double-stranded region of the siRNA, and one or both termini of either strand comprises single-stranded nucleotides.

[0263] Another examples of complementary (e.g., partially, substantially, or fully complementary) sequences are an antisense strand and its target mRNA sequence. In certain aspects, an antisense strand is substantially or fully complementary to its target mRNA. For example, the complementary (e.g., partially, substantially, or fully complementary) sequences may be between an antisense strand and a coding region of the target mRNA, or a non-coding sequence of the target mRNA. In certain aspects, an antisense strand is substantially, or fully complementary to its target mRNA to reduce or eliminate off-target profile for and to improve down-regulation of the target gene (e.g., gene of the target mRNA sequence).

[0264] The terms “identical” or percent “identity,” in the context of two or more nucleic acids or polypeptide sequences, refer to two or more sequences or subsequences that are the same or have a specified percentage of amino acid residues or nucleotides that are the same (i.e., at least 60% identity, or at least 61%, 62%, 63%, 64%, 65%, 66%, 67%, 68%, 69%, 70%, 71%, 72%, 73%, 74%, 75%, 76%, 77%, 78%, 79%, 80%, 81%, 82%, 83%, 84%, 85%, 86%, 87%, 88%, 89%, 90%, 91%, 92%, 93%, 94%, 95%, 96%, 97%, 98%, 99%, or within a range defined by any of two of the preceding values, identity over a specified region when compared and aligned for maximum correspondence over a comparison window or designated region) as measured using a BLAST or BLAST 2.0 sequence comparison algorithms with default parameters described below, or by manual alignment and visual inspection (see, e.g., NCBI web site or the like). This definition also refers to, or may be applied to, the complement of a test sequence. The definition also includes sequences that have deletions and/or additions, as well as those that have substitutions. As described below, the preferred algorithms can account for gaps, insertions and the like. Alignment for purposes of determining percent sequence identity can be achieved in various ways that are within the skill in the art, for instance, using publicly available computer software such as BLAST, BLAST-2, ALIGN, ALIGN-2 or Megalign (DNASTAR) software. Appropriate parameters for measuring alignment, including any algorithms needed to achieve maximal alignment over the full-length of the sequences being compared can be determined by known methods.

[0265] As used herein, “target sequence” or “target gene” refer to a contiguous portion of the nucleotide sequence of an mRNA molecule formed during the transcription of a gene including mRNA that is a product of RNA processing of a primary transcription product. The target portion of the sequence will be at least long enough to serve as a substrate for RNAi-directed cleavage at or near that portion. For example, the target sequence will generally be from 9-36 nucleotides (“nt”) in length, e.g., 15-30 nt in length, including all sub-ranges therebetween. As non-limiting examples, the target sequence may have a length from 15-30 nt, 15-26 nt, 15-23 nt, 15-22 nt, 15-21 nt, 15-20 nt, 15-19 nt, 15-18 nt, 15-17 nt, 18-30 nt, 18-26 nt, 18-23 nt, 18-22 nt, 18-21 nt, 18-20 nt, 19-30 nt, 19-26 nt, 19-23 nt, 19-22 nt, 19-21 nt, 19-20 nt, 19 nt, 20-30 nt, 20-26 nt, 20-25 nt, 20-24 nt, 20-23 nt, 20-22 nt, 20-21 nt, 20 nt, 21-30 nt, 21-26 nt, 21-25 nt, 21-24 nt, 21-23 nt, 21-22 nt, 9 nt, 10 nt, 11 nt, 12 nt, 13 nt, 14 nt, 15 nt, 16 nt, 17 nt, 18 nt, 19 nt, 20 nt, 21 nt, 22 nt, 23 nt, 24 nt, 25 nt, 26 nt, 27 nt, 28 nt, 29 nt, 30 nt, 31 nt, 32 nt, 33 nt, 34 nt, 35 nt, or 36 nt.

[0266] The term “ligand,” as used herein, refers to a compound or moiety that can impose characteristics to provide additional properties, e.g., affinity or cell delivery efficiency, to an RNAi (e.g., dsRNAi) as described herein. The ligand may be coupled or conjugated directly to the RNAi (e.g., sense strand or antisense strand of dsRNA), or indirectly to the RNAi agent (e.g., sense strand or antisense strand of dsRNA) via an intervening linker (“linker”). When a ligand is conjugated or coupled indirectly to the RNAi (e.g., dsRNA) via a linker, the ligand may be formed of a core moiety (e.g., targeting moiety) that has specific function to provide affinity or efficacy and the linker that provides merely an optimal distance, e.g., between the core moiety and the RNAi agent (dsRNA). In certain aspects, the term “ligand” embraces the ligand in combination with the linker. Examples of ligands or targeting moieties thereof may include, but not be limited to, one or more selected from a synthetic or natural compound, a peptide, an antibody, a carbohydrate (e.g., sugar moiety), or an additional nucleic acid.

[0267] The term “modified nucleotide” means a nucleotide having one or more modifications relative to a naturally occurring nucleotide, e.g., RNA. The modified nucleotide may be selected over an unmodified form because of desirable properties such as, for example, enhanced cellular uptake, enhanced affinity for other oligonucleotides or nucleic acid targets, increased stability in the presence of nucleases, and/or reduced immune stimulation. In certain aspects, the modification may be present in at least one of (i) an internucleoside linkage (“linkage”), (ii) a nucleobase, and (iii) a sugar moiety of the nucleotide. In certain aspects, the modification is present in the internucleoside linkage, e.g., by chemically modifying a phosphate (or phosphodiester) linkage or replacing a phosphate (or phosphodiester) linkage with other linking groups. In certain aspects, the modification is present in a sugar moiety, i.e., ribose ring, by substituting hydroxyl group on 2′ position of the ribose ring with other chemical group or by replacing a ring structure with other heterocycloalkyl or cycloalkyl, glycol group having a structure of

[chemical structure]

bicyclic or bridged ring on the ribose such as locked nucleic acid (LNA) having a structure of

[chemical structure]

or the like. In certain aspects, the modification is present in a nucleobase (e.g., A, G, C, T, or U) by chemical modification in a nucleobase by replacing the nucleobase with other moiety, for example, by replacing one naturally occurring nucleobase with another naturally occurring nucleobase. In certain aspects, a modified nucleotide may contain a modification in a sugar moiety and an unmodified phosphate (or phosphodiester) linkage. In certain aspects, a modified nucleotide may have a modification in a sugar moiety but with an unmodified nucleobase. In certain aspects, a modified nucleotide may have a modification in a sugar moiety and a nucleobase. In certain aspects, a modified nucleotide may have a modification in a sugar moiety and a phosphate (or phosphodiester) linkage. In certain aspects, a modified nucleotide may have a modification in a sugar moiety, a phosphate (or phosphodiester) linkage and a nucleobase. In certain aspects, a modified nucleotide may have an unmodified sugar moiety and an unmodified phosphate (or phosphodiester) linkage. In certain aspects, a modified nucleotide may have an unmodified sugar moiety and an unmodified nucleobase. In certain aspects, a modified nucleotide may have an unmodified sugar moiety and a modified nucleobase. In certain aspects, a modified nucleotide may have an unmodified sugar moiety and a modified phosphate (or phosphodiester) linkage. In certain aspects, a modified nucleotide may have a modified sugar moiety, a modified phosphate (or phosphodiester) linkage and a modified nucleobase.

[0268] The term “modified phosphate group,” or “modified phosphodiester linkage” as used herein refers to a chemical group in place of a phosphate group (or phosphodiester linkage) in a nucleotide as being attached to the 3′ end (3′ carbon) of the pentofuranosyl group.

[0269] The terms “identical” or percent “identity,” in the context of two or more nucleic acids or polypeptide sequences, refer to two or more sequences or subsequences that are the same or have a specified percentage of amino acid residues or nucleotides that are the same (i.e., at least 60% identity, or at least 61%, 62%, 63%, 64%, 65%, 66%, 67%, 68%, 69%, 70%, 71%, 72%, 73%, 74%, 75%, 76%, 77%, 78%, 79%, 80%, 81%, 82%, 83%, 84%, 85%, 86%, 87%, 88%, 89%, 90%, 91%, 92%, 93%, 94%, 95%, 96%, 97%, 98%, 99%, or within a range defined by any of two of the preceding values, identity over a specified region when compared and aligned for maximum correspondence over a comparison window or designated region) as measured using a BLAST or BLAST 2.0 sequence comparison algorithms with default parameters described below, or by manual alignment and visual inspection (see, e.g., NCBI web site or the like). This definition also refers to, or may be applied to, the complement of a test sequence. The definition also includes sequences that have deletions and/or additions, as well as those that have substitutions. As described below, the preferred algorithms can account for gaps, insertions and the like. Alignment for purposes of determining percent sequence identity can be achieved in various ways that are within the skill in the art, for instance, using publicly available computer software such as BLAST, BLAST-2, ALIGN, ALIGN-2 or Megalign (DNASTAR) software. Appropriate parameters for measuring alignment, including any algorithms needed to achieve maximal alignment over the full-length of the sequences being compared can be determined by known methods.

[0270] Throughout the disclosure, nucleotide positions or coordinates are relative to the beginning (5′ end) of the reference transcript.

[0271] The term “overhang” or “nucleotide overhang” herein refers to at least one unpaired nucleotide that protrudes from the end of at least one of the two strands of the duplex structure of an RNAi agent. In some embodiments, when a 3′-end of one strand extends beyond the 5′-end of the other strand, or vice versa, this forms a nucleotide overhang, e.g., the unpaired nucleotide(s) form the overhang.

[0272] “Blunt” or “blunt end” means that there are no unpaired nucleotides at that end of the double stranded RNAi agent, i.e., no nucleotide overhang. A “blunt ended” RNAi agent is a dsRNA that is double-stranded over its entire length, i.e., no nucleotide overhang at either end of the molecule.

[0273] A “mismatch” is defined herein as a difference between the base sequence (e.g., A instead of G) or length when two sequences are maximally aligned and compared. In certain aspects, the term “mismatch” means a nucleobase of a first oligonucleotide (e.g., a first strand) that is not capable of pairing with a nucleobase at a corresponding position of a second oligonucleotide (e.g., a second strand).

[0274] The term “non-end” herein refers to a position between the 3′ end and the 5′ end of the sense or antisense strand.

[0275] The term “PCSK9,” refers to a proprotein convertase subtilisin kexin 9 gene or a protein encoded by that gene. PCSK9 is also known as FH3, PC9, FHCL3, NARC1, LDLCQ1, NARC-1, or HCHOLA3. The PCSK9 gene as used herein includes human PCSK9 (e.g., Gene ID: 255738; GenBank Accession No. NM_174936.3 or NM_174936.4), mouse PCSK9 gene (e.g., Gene ID: 100102; GenBank Accession No. NM_153565.2), and dog PCSK9 gene (e.g., Gene ID: 102152231; GenBank Accession No. XM_038667514.1). Additional examples of PCSK9 mRNA sequences from different species and variants are readily available using, e.g., GenBank.

```
Homo sapiens PCSK9, transcript variant 1, mRNA: GenBank: NM_174936.3
(SEQ ID NO: 1)
      1 gtccgatggg gctctggtgg cgtgatctgc gcgccccagg cgtcaagcac ccacacccta
    61 gaaggtttcc gcagcgacgt cgaggcgctc atggttgcag gcgggcgccg ccgttcagtt
  121 cagggtctga gcctggagga gtgagccagg cagtgagact ggctcgggcg ggccgggacg
  181 cgtcgttgca gcagcggctc ccagctccca gccaggattc cgcgcgcccc ttcacgcgcc
  241 ctgctcctga acttcagctc ctgcacagtc ctccccaccg caaggctcaa ggcgccgccg
  301 gcgtggaccg cgcacggcct ctaggtctcc tcgccaggac agcaacctct cccctggccc
  361 tcatgggcac cgtcagctcc aggcggtcct ggtggccgct gccactgctg ctgctgctgc
  421 tgctgctcct gggtcccgcg ggcgcccgtg cgcaggagga cgaggacggc gactacgagg
  481 agctggtgct agccttgcgt tccgaggagg acggcctggc cgaagcaccc gagcacggaa
  541 ccacagccac cttccaccgc tgcgccaagg atccgtggag gttgcctggc acctacgtgg
  601 tggtgctgaa ggaggagacc cacctctcgc agtcagagcg cactgcccgc cgcctgcagg
  661 cccaggctgc ccgccgggga tacctcacca agatcctgca tgtcttccat ggccttcttc
  721 ctggcttcct ggtgaagatg agtggcgacc tgctggagct ggccttgaag ttgccccatg
  781 tcgactacat cgaggaggac tcctctgtct ttgcccagag catcccgtgg aacctggagc
  841 ggattacccc tccacggtac cgggcggatg aataccagcc ccccgacgga ggcagcctgg
  901 tggaggtgta tctcctagac accagcatac agagtgacca ccgggaaatc gagggcaggg
  961 tcatggtcac cgacttcgag aatgtgcccg aggaggacgg gacccgcttc cacagacagg
1021 ccagcaagtg tgacagtcat ggcacccacc tggcaggggt ggtcagcggc cgggatgccg
1081 gcgtggccaa gggtgccagc atgcgcagcc tgcgcgtgct caactgccaa gggaagggca
1141 cggttagcgg caccctcata ggcctggagt ttattcggaa aagccagctg gtccagcctg
1201 tggggccact ggtggtgctg ctgcccctgg cgggtgggta cagccgcgtc ctcaacgccg
1261 cctgccagcg cctggcgagg gctggggtcg tgctggtcac cgctgccggc aacttccggg
1321 acgatgcctg cctctactcc ccagcctcag ctcccgaggt catcacagtt ggggccacca
1381 atgcccaaga ccagccggtg accctgggga ctttggggac caactttggc cgctgtgtgg
1441 acctctttgc cccaggggag gacatcattg gtgcctccag cgactgcagc acctgctttg
1501 tgtcacagag tgggacatca caggctgctg cccacgtggc tggcattgca gccatgatgc
1561 tgtctgccga gccggagctc accctggccg agttgaggca gagactgatc cacttctctg
1621 ccaaagatgt catcaatgag gcctggttcc ctgaggacca gcgggtactg acccccaacc
1681 tggtggccgc cctgcccccc agcacccatg gggcaggttg gcagctgttt tgcaggactg
1741 tatggtcagc acactcgggg cctacacgga tggccacagc cgtcgcccgc tgcgccccag
1801 atgaggagct gctgagctgc tccagtttct ccaggagtgg gaagcggcgg ggcgagcgca
1861 tggaggccca agggggcaag ctggtctgcc gggcccacaa cgcttttggg ggtgagggtg
1921 tctacgccat tgccaggtgc tgcctgctac cccaggccaa ctgcagcgtc cacacagctc
1981 caccagctga ggccagcatg gggacccgtg tccactgcca ccaacagggc cacgtcctca
2041 caggctgcag ctcccactgg gaggtggagg accttggcac ccacaagccg cctgtgctga
2101 ggccacgagg tcagcccaac cagtgcgtgg gccacaggga ggccagcatc cacgcttcct
2161 gctgccatgc cccaggtctg gaatgcaaag tcaaggagca tggaatcccg gcccctcagg
2221 agcaggtgac cgtggcctgc gaggagggct ggaccctgac tggctgcagt gccctccctg
2281 ggacctccca cgtcctgggg gcctacgccg tagacaacac gtgtgtagtc aggagccggg
2341 acgtcagcac tacaggcagc accagcgaag gggccgtgac agccgttgcc atctgctgcc
2401 ggagccggca cctggcgcag gcctcccagg agctccagtg acagccccat cccaggatgg
2461 gtgtctgggg agggtcaagg gctggggctg agctttaaaa tggttccgac ttgtccctct
2521 ctcagccctc catggcctgg cacgagggga tggggatgct tccgcctttc cggggctgct
2581 ggcctggccc ttgagtgggg cagcctcctt gcctggaact cactcactct gggtgcctcc
2641 tccccaggtg gaggtgccag gaagctccct ccctcactgt ggggcatttc accattcaaa
2701 caggtcgagc tgtgctcggg tgctgccagc tgctcccaat gtgccgatgt ccgtgggcag
2761 aatgactttt attgagctct tgttccgtgc caggcattca atcctcaggt ctccaccaag
2821 gaggcaggat tcttcccatg gataggggag ggggcggtag gggctgcagg gacaaacatc
2881 gttggggggt gagtgtgaaa ggtgctgatg gccctcatct ccagctaact gtggagaagc
2941 ccctgggggc tccctgatta atggaggctt agctttctgg atggcatcta gccagaggct
3001 ggagacaggt gcgcccctgg tggtcacagg ctgtgccttg gtttcctgag ccacctttac
3061 tctgctctat gccaggctgt gctagcaaca cccaaaggtg gcctgcgggg agccatcacc
3121 taggactgac tcggcagtgt gcagtggtgc atgcactgtc tcagccaacc cgctccacta
3181 cccggcaggg tacacattcg cacccctact tcacagagga agaaacctgg aaccagaggg
3241 ggcgtgcctg ccaagctcac acagcaggaa ctgagccaga aacgcagatt gggctggctc
3301 tgaagccaag cctcttctta cttcacccgg ctgggctcct catttttacg ggtaacagtg
3361 aggctgggaa ggggaacaca gaccaggaag ctcggtgagt gatggcagaa cgatgcctgc
3421 aggcatggaa ctttttccgt tatcacccag gcctgattca ctggcctggc ggagatgctt
3481 ctaaggcatg gtcgggggag agggccaaca actgtccctc cttgagcacc agccccaccc
3541 aagcaagcag acatttatct tttgggtctg tcctctctgt tgccttttta cagccaactt
3601 ttctagacct gttttgcttt tgtaacttga agatatttat tctgggtttt gtagcatttt
3661 tattaatatg gtgacttttt aaaataaaaa caaacaaacg ttgtcctaac aaaaaaaaaa
3721 aaaaaaaaaa a
Homo sapiens PCSK9, transcript variant 1, mRNA: GenBank: NM_174936.4
(SEQ ID NO: 2)
      1 agcgacgtcg aggcgctcat ggttgcaggc gggcgccgcc gttcagttca gggtctgagc
    61 ctggaggagt gagccaggca gtgagactgg ctcgggcggg ccgggacgcg tcgttgcagc
  121 agcggctccc agctcccagc caggattccg cgcgcccctt cacgcgccct gctcctgaac
  181 ttcagctcct gcacagtcct ccccaccgca aggctcaagg cgccgccggc gtggaccgcg
  241 cacggcctct aggtctcctc gccaggacag caacctctcc cctggccctc atgggcaccg
  301 tcagctccag gcggtcctgg tggccgctgc cactgctgct gctgctgctg ctgctcctgg
  361 gtcccgcggg cgcccgtgcg caggaggacg aggacggcga ctacgaggag ctggtgctag
  421 ccttgcgttc cgaggaggac ggcctggccg aagcacccga gcacggaacc acagccacct
  481 tccaccgctg cgccaaggat ccgtggaggt tgcctggcac ctacgtggtg gtgctgaagg
  541 aggagaccca cctctcgcag tcagagcgca ctgcccgccg cctgcaggcc caggctgccc
  601 gccggggata cctcaccaag atcctgcatg tcttccatgg ccttcttcct ggcttcctgg
  661 tgaagatgag tggcgacctg ctggagctgg ccttgaagtt gccccatgtc gactacatcg
  721 aggaggactc ctctgtcttt gcccagagca tcccgtggaa cctggagcgg attacccctc
  781 cacggtaccg ggcggatgaa taccagcccc ccgacggagg cagcctggtg gaggtgtatc
  841 tcctagacac cagcatacag agtgaccacc gggaaatcga gggcagggtc atggtcaccg
  901 acttcgagaa tgtgcccgag gaggacggga cccgcttcca cagacaggcc agcaagtgtg
  961 acagtcatgg cacccacctg gcaggggtgg tcagcggccg ggatgccggc gtggccaagg
1021 gtgccagcat gcgcagcctg cgcgtgctca actgccaagg gaagggcacg gttagcggca
1081 ccctcatagg cctggagttt attcggaaaa gccagctggt ccagcctgtg gggccactgg
1141 tggtgctgct gcccctggcg ggtgggtaca gccgcgtcct caacgccgcc tgccagcgcc
1201 tggcgagggc tggggtcgtg ctggtcaccg ctgccggcaa cttccgggac gatgcctgcc
1261 tctactcccc agcctcagct cccgaggtca tcacagttgg ggccaccaat gcccaagacc
1321 agccggtgac cctggggact ttggggacca actttggccg ctgtgtggac ctctttgccc
1381 caggggagga catcattggt gcctccagcg actgcagcac ctgctttgtg tcacagagtg
1441 ggacatcaca ggctgctgcc cacgtggctg gcattgcagc catgatgctg tctgccgagc
1501 cggagctcac cctggccgag ttgaggcaga gactgatcca cttctctgcc aaagatgtca
1561 tcaatgaggc ctggttccct gaggaccagc gggtactgac ccccaacctg gtggccgccc
1621 tgccccccag cacccatggg gcaggttggc agctgttttg caggactgta tggtcagcac
1681 actcggggcc tacacggatg gccacagccg tcgcccgctg cgccccagat gaggagctgc
1741 tgagctgctc cagtttctcc aggagtggga agcggcgggg cgagcgcatg gaggcccaag
1801 ggggcaagct ggtctgccgg gcccacaacg cttttggggg tgagggtgtc tacgccattg
1861 ccaggtgctg cctgctaccc caggccaact gcagcgtcca cacagctcca ccagctgagg
1921 ccagcatggg gacccgtgtc cactgccacc aacagggcca cgtcctcaca ggctgcagct
1981 cccactggga ggtggaggac cttggcaccc acaagccgcc tgtgctgagg ccacgaggtc
2041 agcccaacca gtgcgtgggc cacagggagg ccagcatcca cgcttcctgc tgccatgccc
2101 caggtctgga atgcaaagtc aaggagcatg gaatcccggc ccctcaggag caggtgaccg
2161 tggcctgcga ggagggctgg accctgactg gctgcagtgc cctccctggg acctcccacg
2221 tcctgggggc ctacgccgta gacaacacgt gtgtagtcag gagccgggac gtcagcacta
2281 caggcagcac cagcgaaggg gccgtgacag ccgttgccat ctgctgccgg agccggcacc
2341 tggcgcaggc ctcccaggag ctccagtgac agccccatcc caggatgggt gtctggggag
2401 ggtcaagggc tggggctgag ctttaaaatg gttccgactt gtccctctct cagccctcca
2461 tggcctggca cgaggggatg gggatgcttc cgcctttccg gggctgctgg cctggccctt
2521 gagtggggca gcctccttgc ctggaactca ctcactctgg gtgcctcctc cccaggtgga
2581 ggtgccagga agctccctcc ctcactgtgg ggcatttcac cattcaaaca ggtcgagctg
2641 tgctcgggtg ctgccagctg ctcccaatgt gccgatgtcc gtgggcagaa tgacttttat
2701 tgagctcttg ttccgtgcca ggcattcaat cctcaggtct ccaccaagga ggcaggattc
2761 ttcccatgga taggggaggg ggcggtaggg gctgcaggga caaacatcgt tggggggtga
2821 gtgtgaaagg tgctgatggc cctcatctcc agctaactgt ggagaagccc ctgggggctc
2881 cctgattaat ggaggcttag ctttctggat ggcatctagc cagaggctgg agacaggtgc
2941 gcccctggtg gtcacaggct gtgccttggt ttcctgagcc acctttactc tgctctatgc
3001 caggctgtgc tagcaacacc caaaggtggc ctgcggggag ccatcaccta ggactgactc
3061 ggcagtgtgc agtggtgcat gcactgtctc agccaacccg ctccactacc cggcagggta
3121 cacattcgca cccctacttc acagaggaag aaacctggaa ccagaggggg cgtgcctgcc
3181 aagctcacac agcaggaact gagccagaaa cgcagattgg gctggctctg aagccaagcc
3241 tcttcttact tcacccggct gggctcctca tttttacggg taacagtgag gctgggaagg
3301 ggaacacaga ccaggaagct cggtgagtga tggcagaacg atgcctgcag gcatggaact
3361 ttttccgtta tcacccaggc ctgattcact ggcctggcgg agatgcttct aaggcatggt
3421 cgggggagag ggccaacaac tgtccctcct tgagcaccag ccccacccaa gcaagcagac
3481 atttatcttt tgggtctgtc ctctctgttg cctttttaca gccaactttt ctagacctgt
3541 tttgcttttg taacttgaag atatttattc tgggttttgt agcattttta ttaatatggt
3601 gactttttaa aataaaaaca aacaaacgtt gtcctaa
```

[0276] In certain aspects, PCSK9 may include a fragment, variant, or mutant of the protein that may have the same or similar amino acid sequences (e.g., having about 80%, 85%, 90%, 95%, or 99% or greater of similarity or identity of amino acid sequences) with any one of the above listed PCSK9 gene (mRNA) or protein sequences. In certain aspects, PCSK9 may include a fragment, variant, or mutant of the protein having the same or in similar in vivo or in vitro enzymatic (e.g., reductase) activity, for example, having about 80%, 85%, 90%, 95%, or 99% or the native protein activity, to bind to LDLR on the surface of a liver cell.

[0277] The term “Compound” as used herein refers to a double stranded RNA (e.g., PCSK9 dsRNA or dsRNAi agent) that is conjugated with a ligand or a delivery moiety, while a term “compound” denotation may refer to a substance, molecule or chemical entity that can be chemically defined and/or identifiable. In the present disclosure, Compounds are numbered in examples, e.g., “D1”

[0278] As defined herein, the term “inhibition”, “inhibit”, “inhibiting” and the like mean negatively affecting (e.g. decreasing) activity, expression or function relative to the activity, expression or function in the absence of an inhibitor. In certain aspects, inhibition can mean negatively affecting (e.g. decreasing) the concentration or levels of a biomolecule, such as a protein or mRNA, relative to the concentration or level of the biomolecule in the absence of an inhibitor. In certain aspects, inhibition includes, partially or totally, blocking stimulation, decreasing, preventing, or delaying activation; inactivating, desensitizing, or down-regulating signal transduction or enzymatic activity; or decreasing the amount of a biomolecule target (e.g., protein target or mRNA target). In certain aspects, inhibition refers to a reduction in the expression of a particular biomolecule target, such as a protein target (e.g., PCSK9 protein) or an mRNA target (e.g., PCSK9 mRNA). In certain aspects, inhibition refers to a reduction of amount of a target biomolecule (e.g., PCSK9 protein or mRNA) resulting from a down-regulating protein expression (e.g. directly inhibiting translation or transcription). In certain aspects, inhibition refers to a reduction of activity of a target biomolecule (e.g., PCSK9 protein or mRNA) from an indirect interaction (e.g., inhibiting or regulating other transcriptional or translational factors).

[0279] The term “inhibitor” also refers to a compound, composition, or substance capable of detectably negatively affecting (e.g. decreasing) activity, expression or function of a given protein or gene. For example, an inhibitor may decrease activity, expression or function by about 10%, 20%, 30%, 40%, 50%, 60%, 70%, 80%, 90% or greater in comparison to a control in the absence of the inhibitor. Inhibitors include, for example, synthetic or biological molecules, such as oligonucleotides. In some embodiments, the inhibitors include RNAi agent, e.g., siRNA agent, dsRNAi agent, or dsRNA agent.

[0280] As used herein, the “level or degree of inhibiting or decreasing expression” of a given gene refers to the at least partial suppression of the expression of a target gene (e.g., PCSK9), as manifested by a reduction of the amount of the target gene mRNA (e.g., PCSK9 mRNA) or protein (e.g., PCSK9) encoded by the target gene, which may be isolated from or detected in a group of cells (“a first cell”) in which a target gene is transcribed and which has or have been treated such that the expression of a target gene is inhibited, as compared to group of cells substantially identical to the first cell but without treated (“control cells” or “a second cell”).

[0281] In some embodiments, the level or expression of the target gene (e.g., PCSK9) can be measured by evaluation of mRNA (e.g., via Northern blots or PCR). The effect of an RNAi agent on the target gene (e.g., PCSK9) expression can be determined by measuring the gene transcription rates (e.g., via Northern blots; or reverse transcriptase polymerase chain reaction or real-time polymerase chain reaction). In some embodiments, the degree of inhibition can be calculated as the following equation:

$$\frac{( mRNA in control cells ) - ( mRNA in treated cells )}{( mRNA in control cells )} •100 \%$$

[0282] Alternatively, the degree of inhibition may be given in terms of a reduction of a parameter that is functionally linked to target gene (e.g., PCSK9) expression, e.g., the amount of protein encoded by a target gene (e.g., PCSK9), alteration in expression of the protein whose expression is dependent on the target gene (e.g., PCSK9), alteration in an activity of the enzyme (e.g., PCSK9) encoded by the target gene (e.g., PCSK9). In some embodiments, the level or expression of the protein (e.g., PCSK9) from the target gene can be evaluated by measuring the expressed protein amount (e.g., Western blots). In some embodiments, the level or expression of the protein from the target gene can be measured by the enzymatic assay (e.g., kinetic assay) of the protein.

[0283] As used herein, the term “down-regulate” or “down-regulating” refers to any decrease (e.g., statistically significant) in a biological activity and/or expression of the target protein (e.g., PCSK9), including full blocking of the activity (i.e., complete inhibition) and/or expression. For example, “down-regulation” can refer to a decrease of at least about 10%, 20%, 30%, 40%, 50%, 60%, 70%, 80%, 90% or 100% in target protein (e.g., PCSK9) level, activity and/or expression.

[0284] As used herein, the terms “salt” or “salts” refers to an acid addition or base addition salt of a compound of the present invention. “Salts” include in particular “pharmaceutical acceptable salts”. The term “pharmaceutically acceptable salts” refers to salts that retain the biological effectiveness and properties of the compounds of this invention and, which typically are not biologically or otherwise undesirable. In many cases, the compounds of the present invention are capable of forming acid and/or base salts by virtue of the presence of amino and/or carboxyl groups or groups similar thereto. When both a basic group and an acid group are present in the same molecule, the compounds of the present invention may also form internal salts, e.g., zwitterionic molecules. In certain aspects, pharmaceutically acceptable acid addition salts can be formed with inorganic acids and organic acids. Examples of the inorganic acids from which salts can be derived include, for example, hydrochloric acid, hydrobromic acid, sulfuric acid, nitric acid, phosphoric acid, and the like. Examples of the organic acids from which salts can be derived include, for example, acetic acid, propionic acid, glycolic acid, oxalic acid, maleic acid, malonic acid, succinic acid, fumaric acid, tartaric acid, citric acid, benzoic acid, mandelic acid, methanesulfonic acid, ethanesulfonic acid, toluenesulfonic acid, sulfosalicylic acid, and the like. In certain aspects, the pharmaceutically acceptable base addition salts can be formed with inorganic and organic bases. Examples of the inorganic bases from which salts can be derived include, for example, ammonium salts and metals from columns I to XII of the periodic table, such as sodium, potassium, ammonium, calcium, magnesium, iron, silver, zinc, and copper; particularly suitable salts include ammonium, potassium, sodium, calcium and magnesium salts. Examples of the organic bases from which salts can be derived include, for example, primary, secondary, and tertiary amines, substituted amines including naturally occurring substituted amines, cyclic amines, basic ion exchange resins, and the like, such as organic amines include isopropylamine, benzathine, cholinate, diethanolamine, diethylamine, lysine, meglumine, piperazine and tromethamine.

[0285] In certain aspects, the term “pharmaceutically acceptable salt” as used herein may include the salts forms in acetate, ascorbate, adipate, aspartate, benzoate, besylate, bromide/hydrobromide, bicarbonate/carbonate, bisulfate/sulfate, camphorsulfonate, caprate, chloride/hydrochloride, chlortheophyllonate, citrate, ethandisulfonate, fumarate, gluceptate, gluconate, glucuronate, glutamate, glutarate, glycolate, hippurate, hydroiodide/iodide, isethionate, lactate, lactobionate, laurylsulfate, malate, maleate, malonate, mandelate, mesylate, methylsulphate, mucate, naphthoate, napsylate, nicotinate, nitrate, octadecanoate, oleate, oxalate, palmitate, pamoate, phosphate/hydrogen phosphate/dihydrogen phosphate, polygalacturonate, propionate, sebacate, stearate, succinate, sulfosalicylate, sulfate, tartrate, tosylate trifenatate, trifluoroacetate or xinafoate.

[0286] As used herein, the term “pharmaceutically acceptable carrier” refers to a substance useful in the preparation or use of a pharmaceutical composition and includes, for example, suitable diluents, solvents, dispersion media, surfactants, antioxidants, preservatives, isotonic agents, buffering agents, emulsifiers, absorption delaying agents, salts, drug stabilizers, binders, excipients, disintegration agents, lubricants, wetting agents, sweetening agents, flavoring agents, dyes, and combinations thereof, as would be known to those skilled in the art (see, for example, Remington The Science and Practice of Pharmacy, 22nd Ed. Pharmaceutical Press, 2013, pp. 1049-1070).

[0287] As used herein, the term “treat,” “treating,” or “treatment” of any disease or disorder refers to alleviating or ameliorating the disease or disorder (i.e., slowing or arresting the development of the disease or at least one of the clinical symptoms thereof); or alleviating or ameliorating at least one physical parameter or biomarker associated with the disease or disorder, including those which may not be discernible to the patient. In some embodiments, treating does not include preventing.

[0288] As used herein, the term “prevent”, “preventing” or “prevention” of any disease or disorder refers to the prophylactic treatment of the disease or disorder; or delaying the onset or progression of the disease or disorder.

[0289] The term “therapy,” as used herein refers to an application of one or more specific procedures used for the amelioration of at least one indicator or a disease or condition. In certain aspects, the specific procedure is the administration of one or more pharmaceutical or therapeutic agents.

[0290] The term “associated” or “associated with” in the context of a substance or substance activity or function associated with a disease (e.g. a protein associated disease, or PCSK9 associated disease) means that the disease is caused by (in whole or in part), or a symptom of the disease is caused by (in whole or in part) the substance or substance activity or function (e.g., PCSK9 activity or function). Thus, as used herein, what is described as “being associated” with a disease, if a causative agent, could be a target for treatment of the disease.

[0291] As used herein, the term “hyperlipidemia” refers to any disorder, disease or condition characterized by abnormal elevation of levels of any or all lipids, such as cholesterol and triglycerides, and/or lipoproteins in the blood or a condition that can lead to abnormal elevation of levels of any or all lipids and/or lipoproteins in the blood. In one embodiment, the hyperlipidemia is hypertriglyceridemia. As used herein, the term “hypertriglyceridemia” refers to a condition in which triglyceride levels are elevated, often caused or exacerbated by uncontrolled hyperlipidemia mellitus, obesity, and sedentary habits. In some embodiments, hypertriglyceridemia means triglycerides in blood are greater than 1000-2000 mg/dL. As used herein the term “hypercholesterolemia” refers to a form of hyperlipidemia (elevated levels of lipids in the blood) in which there are high levels of cholesterol in the serum of a subject. In some embodiments, hypercholesterolemia means at least about 240 mg/dL of total cholesterol.

[0292] As used herein, the term “administering” means oral administration, administration as a suppository, topical contact, intravenous, intraperitoneal, intramuscular, intralesional, intrathecal, intranasal or subcutaneous administration, or the implantation of a slow-release device, e.g., a mini-osmotic pump, to a subject. Administration is by any route, including parenteral and transmucosal (e.g., buccal, sublingual, palatal, gingival, nasal, vaginal, rectal, or transdermal) compatible with the preparation. Parenteral administration includes, e.g., intravenous, intramuscular, intra-arteriole, intradermal, subcutaneous, intraperitoneal, intraventricular, and intracranial. Other modes of delivery include, but are not limited to, the use of liposomal formulations, intravenous infusion, transdermal patches, etc.

[0293] The terms “subject” and “patient” as used herein are used interchangeably. The term subject includes a human or non-human animal, preferably a vertebrate, and more preferably a mammal. In certain aspects, the subject is a human. In certain aspects, the subject is a human patient.

[0294] As used herein, a subject is “in need of” a treatment if such subject would benefit biologically, medically or in quality of life from such treatment.

[0295] The term “a therapeutically effective amount” of a compound (e.g., siRNA) as disclosed herein refers to an amount of the compound that will elicit the biological or medical response of a subject, for example, reduction or inhibition of an enzyme or a protein activity, or ameliorate symptoms, alleviate conditions, slow or delay disease progression, or prevent a disease, etc. In certain aspects, the term “a therapeutically effective amount” refers to the amount of the compound (e.g., siRNA) of the disclosure that, when administered to a subject, is effective to (1) at least partially alleviate, prevent and/or ameliorate a condition, or a disorder or a disease (i) mediated by the target gene (e.g., PCSK9), or (ii) associated with its activity, or (iii) characterized by activity (normal or abnormal) of the protein encoded by the target gene (e.g., PCSK9); or (2) reduce or inhibit the activity of the protein encoded by the target gene (e.g., PCSK9); or (3) reduce or inhibit the expression of the target gene (e.g., PCSK9). In certain aspects, the term “a therapeutically effective amount” refers to the amount of the compound that, when administered to a cell, or a tissue, or a non-cellular biological material, or a medium, is effective to at least partially reducing or inhibiting the activity of the protein encoded by the target gene (e.g., PCSK9); or at least partially reducing or inhibiting the expression of the protein (e.g., PCSK9) encoded by the target gene. The meaning of the term “a therapeutically effective amount” as illustrated in the above embodiment for the target gene expression also applies by the same means to any other relevant proteins/peptides/enzymes (e.g., PCSK9 or other proteins relevant to cholesterol uptake).

[0296] For any compound described herein, the therapeutically effective amount can be initially determined from cell culture assays. Target concentrations will be those concentrations of active compound(s) that are capable of achieving the methods described herein, as measured using the methods described herein or known in the art. Therapeutically effective amounts for use in humans can also be determined from animal models. For example, a dose for humans can be formulated to achieve a concentration that has been found to be effective in animals. The dosage in humans can be adjusted by monitoring compounds effectiveness and adjusting the dosage upwards or downwards, as described above. An example of an “therapeutically effective amount” is an amount sufficient to contribute to the treatment, prevention, or reduction of a symptom or symptoms of a disease. For example, for the given parameter (e.g., biomarker), a therapeutically effective amount will show an increase or decrease of at least about 5%, about 10%, about 15%, about 20%, about 25%, about 40%, about 50%, about 60%, about 75%, about 80%, about 90%, or about 95%. Therapeutic efficacy can also be expressed as “-fold” increase or decrease. For example, a therapeutically effective amount can have at least a 1.2-fold, 1.5-fold, 2-fold, 5-fold, or more effect over a control.

[0297] The term “control” or “control experiment” is used in accordance with its plain ordinary meaning and refers to an experiment in which the subjects or reagents of the experiment are treated as in a parallel experiment except for omission of a procedure, reagent, or variable of the experiment. Typically, a control is used as a standard of comparison in evaluating experimental effects. In some embodiments, a control is the measurement of the expression of a protein or mRNA (e.g., PCSK9) in the absence of RNAi agents as described herein.

[0298] Unless defined otherwise, the chemical structures and formulae set forth herein are constructed according to the standard rules of chemical valency known in the chemical arts.

[0299] The term “alkyl,” by itself or as part of another substituent, means, unless otherwise stated, a straight (i.e., unbranched) or branched carbon chain (or carbon), or combination thereof, which is fully saturated (i.e., molecule by only single bonds) and include mono-, di- and multivalent radicals. As used herein, the alkyl is an uncyclized chain. The alkyl may include a designated number of carbons (e.g., C₁-C₁₀ means one to ten carbons). Examples of alkyl include, but are not limited to, groups such as C₁₋₃₀ alkyl, C₁₋₂₅ alkyl, C₁₋₂₀ alkyl, C₁₋₁₅ alkyl, C₁₋₁₂ alkyl, C₁₋₁₀ alkyl, C₁₋₈ alkyl, C₁₋₆ alkyl, C₁₋₄ alkyl, or C₁₋₃ alkyl. For example, C₁₋₆ alkyl include, but are not limited to, methyl, ethyl, n-propyl, 1-methylethyl (iso-propyl), n-butyl, n-pentyl and 1,1-dimethylethyl (t-butyl), and their isomers.

[0300] A term “alkylene,” by itself or as part of another substituent, means, unless otherwise stated, a divalent radical derived from an alkyl, as exemplified, but not limited by, —CH₂CH₂CH₂CH₂—.

[0301] As used herein, the term “alkenyl,” by itself or as part of another substituent, means, unless otherwise stated, a straight (i.e., unbranched) or branched carbon chain (or carbon), or combination thereof, which is mono- or polyunsaturated (i.e., molecule including at least one double bond) and include mono-, di- and multivalent radicals. As used herein, the alkenyl is an uncyclized chain. Like the alkyl, the alkenyl may include a designated number of carbons (e.g., C₁-C₁₀ means one to ten carbons). Examples of alkenyl include, but are not limited to, groups such as C₁₋₃₀ alkenyl, C₁₋₂₅ alkenyl, C₁₋₂₀ alkenyl, C₁₋₁₅ alkenyl, C₁₋₁₂ alkenyl, C₁₋₁₀ alkenyl, C₁₋₈ alkenyl, C₁₋₆ alkenyl, C₁₋₄ alkenyl, or C₁₋₃ alkenyl. For example, C₂₋₆ alkenyl include, but are not limited to, ethenyl (vinyl), prop-1-enyl, but-1-enyl, pent-1-enyl, pent-4-enyl and penta-1,4-dienyl, and their isomers. A term “alkenylene,” by itself or as part of another substituent, means, unless otherwise stated, a divalent radical derived from an alkenyl, as exemplified, but not limited by, —CH═CHCH₂CH₂—.

[0302] As used herein, the term “alkynyl,” by itself or as part of another substituent, means, unless otherwise stated, a straight (i.e., unbranched) or branched carbon chain (or carbon), or combination thereof, which is mono- or polyunsaturated (i.e., molecule including at least one triple bond) and include mono-, di- and multivalent radicals. As used herein, the alkynyl is an uncyclized chain. Like the alkyl, the alkynyl may include a designated number of carbons (e.g., C₁-C₁₀ means one to ten carbons). Examples of alkynyl include, but are not limited to, groups such as C₁₋₃₀ alkynyl, C₁₋₂₅ alkynyl, C₁₋₂₀ alkynyl, C₁₋₁₅ alkynyl, C₁₋₁₂ alkynyl, C₁₋₁₀ alkynyl, C₁₋₈ alkynyl, C₁₋₆ alkynyl, C₁₋₄ alkynyl, or C₁₋₃ alkynyl. For example, C₂₋₆ alkynyl include, but are not limited to, alkynyl, and their isomers. A term “alkynyl,” by itself or as part of another substituent, means, unless otherwise stated, a divalent radical derived from an alkenyl, as exemplified, but not limited by, —CCH₂CH₂—.

[0303] As used herein, the term “alkoxy” refers to a radical of the formula —OR^{a} where R^{a} is an alkyl (e.g., C₁₋₃₀ alkyl, C₁₋₂₅ alkyl, C₁₋₂₀ alkyl, C₁₋₁₅ alkyl, C₁₋₁₂ alkyl, C₁₋₁₀ alkyl, C₁₋₈ alkyl, C₁₋₆ alkyl, C₁₋₄ alkyl, or C₁₋₃ alkyl) radical as generally defined above. For example, C₁₋₆ alkoxy include, but are not limited to, methoxy, ethoxy, propoxy, isopropoxy, butoxy, isobutoxy, pentoxy, and hexoxy.

[0304] As used herein, the term “alkoxyalkyl” refers to a radical of the formula —R^{a}—O—R^{b} where each R^{a} and R^{b} is independently an alkyl (e.g., C₁₋₃₀ alkyl, C₁₋₂₅ alkyl, C₁₋₂₀ alkyl, C₁₋₁₅ alkyl, C₁₋₁₂ alkyl, C₁₋₁₀ alkyl, C₁₋₈ alkyl, C₁₋₆ alkyl, C₁₋₄ alkyl, or C₁₋₃ alkyl) radical as defined above and oxygen atom may be bonded to any carbon atom in either alkyl radical. For example, C₁₋₆alkoxy C₁₋₆alkyl include, but are not limited to, methoxy-methyl, methoxy-ethyl, ethoxy-ethyl, 1-ethoxy-propyl and 2-methoxy-butyl.

[0305] As used herein, the term “alkylcarbonyl” refers to a radical of the formula —C(═O)—R^{a} where R^{a} is an alkyl (e.g., C₁₋₃₀ alkyl, C₁₋₂₅ alkyl, C₁₋₂₀ alkyl, C₁₋₁₅ alkyl, C₁₋₁₂ alkyl, C₁₋₁₀ alkyl, C₁₋₈ alkyl, C₁₋₆ alkyl, C₁₋₄ alkyl, or C₁₋₃ alkyl) radical as defined above.

[0306] As used herein, the term “alkyl-carbonyl alkyl” refers to a radical of the formula, e.g., —R^{a}—C(═O)—R^{b} where each R^{a} and R^{b} is independently an alkyl (e.g., C₁₋₃₀ alkyl, C₁₋₂₅ alkyl, C₁₋₂₀ alkyl, C₁₋₁₅ alkyl, C₁₋₁₂ alkyl, C₁₋₁₀ alkyl, C₁₋₈ alkyl, C₁₋₆ alkyl, C₁₋₄ alkyl, or C₁₋₃ alkyl) radical as defined above. The carbon atom of the carbonyl group may be bonded to any carbon atom in either alkyl radical.

[0307] As used herein, the term “alkylaminocarbonyl” refers to a radical of the formula —C(═O)—NH—R^{a} where R^{a} is an alkyl (e.g., C₁₋₃₀ alkyl, C₁₋₂₅ alkyl, C₁₋₂₀ alkyl, C₁₋₁₅ alkyl, C₁₋₁₂ alkyl, C₁₋₁₀ alkyl, C₁₋₈ alkyl, C₁₋₆ alkyl, C₁₋₄ alkyl, or C₁₋₃ alkyl) as defined above.

[0308] As used herein, the term “alkoxycarbonyl” refers to a radical of the formula —C(═O)—O—R^{a} where R^{a} is an alkyl (e.g., C₁₋₃₀ alkyl, C₁₋₂₅ alkyl, C₁₋₂₀ alkyl, C₁₋₁₅ alkyl, C₁₋₁₂ alkyl, C₁₋₁₀ alkyl, C₁₋₈ alkyl, C₁₋₆ alkyl, C₁₋₄ alkyl, or C₁₋₃ alkyl) radical as defined above.

[0309] As used herein, the term “alkoxycarbonyl alkyl” refers to a radical of the formula —R^{a}—C(═O)—O—R^{b} where each R^{a} and R^{b} is independently an alkyl (e.g., C₁₋₃₀ alkyl, C₁₋₂₅ alkyl, C₁₋₂₀ alkyl, C₁₋₁₅ alkyl, C₁₋₁₂ alkyl, C₁₋₁₀ alkyl, C₁₋₈ alkyl, C₁₋₆ alkyl, C₁₋₄ alkyl, or C₁₋₃ alkyl) radical as defined above.

[0310] As used herein, the term “haloalkyl” refers to an alkyl (e.g., C₁₋₃₀ alkyl, C₁₋₂₅ alkyl, C₁₋₂₀ alkyl, C₁₋₁₅ alkyl, C₁₋₁₂ alkyl, C₁₋₁₀ alkyl, C₁₋₈ alkyl, C₁₋₆ alkyl, C₁₋₄ alkyl, or C₁₋₃ alkyl) radical, as defined above, substituted by one or more halo radicals, as defined above. Examples of halogenC₁₋₆alkyl include, but are not limited to, trifluoromethyl, difluoromethyl, fluoromethyl, trichloromethyl, 2,2,2-trifluoroethyl, 1,3-dibromopropan-2-yl, 3-bromo-2-fluoropropyl and 1,4,4-trifluorobutan-2-yl.

[0311] As used herein, the term “hydroxyalkyl” refers to an alkyl (e.g., C₁₋₃₀ alkyl, C₁₋₂₅ alkyl, C₁₋₂₀ alkyl, C₁₋₁₅ alkyl, C₁₋₁₂ alkyl, C₁₋₁₀ alkyl, C₁₋₈ alkyl, C₁₋₆ alkyl, C₁₋₄ alkyl, or C₁₋₃ alkyl) radical as defined above, wherein one of the hydrogen atoms of the alkyl radical is replaced by OH. Examples of hydroxyC₁₋₆ alkyl include, but are not limited to, hydroxy-methyl, 2-hydroxy-ethyl, 2-hydroxy-propyl, 3-hydroxy-propyl and 5-hydroxy-pentyl.

[0312] As used herein, the term “aminoalkyl” refers to an alkyl (e.g., C₁₋₃₀ alkyl, C₁₋₂₅ alkyl, C₁₋₂₀ alkyl, C₁₋₁₅ alkyl, C₁₋₁₂ alkyl, C₁₋₁₀ alkyl, C₁₋₈ alkyl, C₁₋₆ alkyl, C₁₋₄ alkyl, or C₁₋₃ alkyl) radical as defined above, wherein one of the hydrogen atoms of the C₁₋₆alkyl group is replaced by a primary amino group. Examples of amino C₁₋₆ alkyl include, but are not limited to, amino-methyl, 2-amino-ethyl, 2-amino-propyl, 3-amino-propyl, 3-amino-pentyl and 5-amino-pentyl.

[0313] As used herein, the term “alkylamino” refers to a radical of the formula —NH—R^{a} where R^{a} is an alkyl (e.g., C₁₋₃₀ alkyl, C₁₋₂₅ alkyl, C₁₋₂₀ alkyl, C₁₋₁₅ alkyl, C₁₋₁₂ alkyl, C₁₋₁₀ alkyl, C₁₋₈ alkyl, C₁₋₆ alkyl, C₁₋₄ alkyl, or C₁₋₃ alkyl) radical as defined above.

[0314] The term “heteroalkyl,” by itself or in combination with another term, means, unless otherwise stated, a stable straight or branched chain, or combination thereof, which is fully saturated (i.e., molecule by only single bonds) and include mono-, di- and multivalent radicals, including at least one carbon atom and at least one heteroatom (e.g., O, N, S, Si, or P), and wherein the nitrogen and sulfur atoms may optionally be oxidized, and the nitrogen heteroatom may optionally be quaternized. The heteroatom(s) (e.g., O, N, S, Si, or P) may be placed at any interior position of the heteroalkyl group or at the position at which the alkyl group is attached to the remainder of the molecule. Heteroalkyl is an uncyclized chain. The heteroalkyl may include a designated number of carbons and heteroatoms (e.g., “2 to 10 membered heteroalkyl” means two to 10 atoms including carbons and heteroatoms).

[0315] Similarly, the term “heteroalkylene,” by itself or as part of another substituent, means, unless otherwise stated, a divalent radical derived from heteroalkyl, as exemplified, but not limited by, —CH₂—CH₂—S—CH₂—CH₂— and —CH₂—S—CH₂—CH₂—NH—CH₂—. For heteroalkylene groups, heteroatoms can also occupy either or both of the chain termini (e.g., alkyleneoxy, alkylenedioxy, alkyleneamino, alkylenediamino, and the like).

[0316] As used herein, the term “heteroalkenyl,” by itself or as part of another substituent, means, unless otherwise stated, a straight (i.e., unbranched) or branched carbon chain (or carbon), or combination thereof, which is mono- or polyunsaturated (i.e., molecule including at least one double bond between carbon and carbon) and include mono-, di- and multivalent radicals. As used herein, the alkenyl is an uncyclized chain. Like the alkenyl, the heteroalkenyl may include a designated number of carbons and heteroatoms (e.g., “2 to 10 membered heteroalkenyl” means two to 10 atoms including carbons and heteroatoms).

[0317] As used herein, the term “heteroalkynyl,” by itself or as part of another substituent, means, unless otherwise stated, a straight (i.e., unbranched) or branched carbon chain (or carbon), or combination thereof, which is mono- or polyunsaturated (i.e., molecule including at least one triple bond between carbon and carbon) and include mono-, di- and multivalent radicals. As used herein, the alkynyl is an uncyclized chain. The heteroalkynyl may include a designated number of carbons and heteroatoms (e.g., “2 to 10 membered heteroalkynyl” means two to 10 atoms including carbons and heteroatoms).

[0318] For alkylene and heteroalkylene linking groups, no orientation of the linking group is implied by the direction in which the formula of the linking group is written. For example, the formula —C(O)₂R′— represents both —C(O)₂R′— and —R′C(O)₂—.

[0319] A “cycloalkylene” and a “heterocycloalkylene,” alone or as part of another substituent, means a divalent radical derived from a cycloalkyl and heterocycloalkyl, respectively. The terms “cycloalkyl” and “heterocycloalkyl,” by themselves or in combination with other terms, mean, unless otherwise stated, cyclic versions of “alkyl” and “heteroalkyl,” respectively. Cycloalkyl and heterocycloalkyl are not aromatic. Additionally, for heterocycloalkyl, a heteroatom can occupy the position at which the heterocycle is attached to the remainder of the molecule. Examples of cycloalkyl include, but are not limited to, cyclopropyl, cyclobutyl, cyclopentyl, cyclohexyl, 1-cyclohexenyl, 3-cyclohexenyl, cycloheptyl, and the like. Examples of heterocycloalkyl include, but are not limited to, 1-(1,2,5,6-tetrahydropyridyl), 1-piperidinyl, 2-piperidinyl, 3-piperidinyl, 4-morpholinyl, 3-morpholinyl, tetrahydrofuran-2-yl, tetrahydrofuran-3-yl, tetrahydrothien-2-yl, tetrahydrothien-3-yl, 1-piperazinyl, 2-piperazinyl, and the like. A “cycloalkylene” and a “heterocycloalkylene,” alone or as part of another substituent, means a divalent radical derived from a cycloalkyl and heterocycloalkyl, respectively.

[0320] The term “aryl” means, unless otherwise stated, a polyunsaturated, aromatic, hydrocarbon substituent, which can be a single ring or multiple rings (preferably from 1 to 3 rings) that are fused together (i.e., a fused ring aryl) or linked covalently. A fused ring aryl refers to multiple rings fused together wherein at least one of the fused rings is an aryl ring. The term “heteroaryl” refers to aryl groups (or rings) that contain at least one heteroatom such as N, O, or S, wherein the nitrogen and sulfur atoms are optionally oxidized, and the nitrogen atom(s) are optionally quaternized. Thus, the term “heteroaryl” includes fused ring heteroaryl groups (i.e., multiple rings fused together wherein at least one of the fused rings is a heteroaromatic ring). A 5,6-fused ring heteroarylene refers to two rings fused together, wherein one ring has 5 members and the other ring has 6 members, and wherein at least one ring is a heteroaryl ring. Likewise, a 6,6-fused ring heteroarylene refers to two rings fused together, wherein one ring has 6 members and the other ring has 6 members, and wherein at least one ring is a heteroaryl ring. And a 6,5-fused ring heteroarylene refers to two rings fused together, wherein one ring has 6 members and the other ring has 5 members, and wherein at least one ring is a heteroaryl ring. A heteroaryl group can be attached to the remainder of the molecule through a carbon or heteroatom. Non-limiting examples of aryl and heteroaryl groups include phenyl, naphthyl, pyrrolyl, pyrazolyl, pyridazinyl, triazinyl, pyrimidinyl, imidazolyl, pyrazinyl, purinyl, oxazolyl, isoxazolyl, thiazolyl, furyl, thienyl, pyridyl, pyrimidyl, benzothiazolyl, benzooxazoyl benzimidazolyl, benzofuran, isobenzofuranyl, indolyl, isoindolyl, benzothiophenyl, isoquinolyl, quinoxalinyl, quinolyl, 1-naphthyl, 2-naphthyl, 4-biphenyl, 1-pyrrolyl, 2-pyrrolyl, 3-pyrrolyl, 3-pyrazolyl, 2-imidazolyl, 4-imidazolyl, pyrazinyl, 2-oxazolyl, 4-oxazolyl, 2-phenyl-4-oxazolyl, 5-oxazolyl, 3-isoxazolyl, 4-isoxazolyl, 5-isoxazolyl, 2-thiazolyl, 4-thiazolyl, 5-thiazolyl, 2-furyl, 3-furyl, 2-thienyl, 3-thienyl, 2-pyridyl, 3-pyridyl, 4-pyridyl, 2-pyrimidyl, 4-pyrimidyl, 5-benzothiazolyl, purinyl, 2-benzimidazolyl, 5-indolyl, 1-isoquinolyl, 5-isoquinolyl, 2-quinoxalinyl, 5-quinoxalinyl, 3-quinolyl, and 6-quinolyl. Substituents for each of the above noted aryl and heteroaryl ring systems are selected from the group of acceptable substituents described below. An “arylene” and a “heteroarylene,” alone or as part of another substituent, mean a divalent radical derived from an aryl and heteroaryl, respectively.

[0321] The terms “halo” or “halogen,” by themselves or as part of another substituent, mean, unless otherwise stated, a fluorine, chlorine, bromine, or iodine atom. Additionally, terms such as “haloalkyl” are meant to include monohaloalkyl and polyhaloalkyl. For example, the term “halo(C₁-C₄)alkyl” includes, but is not limited to, fluoromethyl, difluoromethyl, trifluoromethyl, 2,2,2-trifluoroethyl, 4-chlorobutyl, 3-bromopropyl, and the like.

[0322] The symbol “ [symbol] ” denotes the point of attachment of a chemical moiety to the remainder of a molecule or chemical formula.

[0323] The term “oxo,” as used herein, means an oxygen that is double-bonded to a carbon atom.

[0324] Each of the above terms (e.g., “alkyl,” “heteroalkyl,” “cycloalkyl,” “heterocycloalkyl,” “aryl,” and “heteroaryl”) includes both substituted and unsubstituted forms of the indicated radical. Substituents for the alkyl and heteroalkyl radicals (including those groups often referred to as alkylene, alkenyl, heteroalkylene, heteroalkenyl, alkynyl, cycloalkyl, heterocycloalkyl, cycloalkenyl, and heterocycloalkenyl) can be one or more of a variety of groups selected from, but not limited to, —OR′, ═O, ═NR′, ═N—OR′, NR′R″, SR′, -halogen, SiR′R″R′″, OC(O)R′, —C(O)R′, —CO₂R′, —CONR′R″, —OC(O)NR′R″, —NR″C(O)R′, —NR′ C(O)NR″R′″, —NR″C(O)₂R′, —NR C(NR′R″R′″)═NR′″, —NR—C(NR′R″)═NR′″, —S(O)R′, —S(O)₂R′, —S(O)₂NR′R″, —NRSO₂R′, —NR′NR″R′″, —ONR′R″, —NR′C(O)NR″NR′″R′″, CN, —NO₂, —NR′SO₂R″, —NR′C(O)R″, —NR′C(O)—OR″, —NR′OR″, in a number ranging from zero to (2m′+1), where m′ is the total number of carbon atoms in such radical. R, R′, R″, R′″, and R′″ each preferably independently refer to hydrogen, substituted or unsubstituted heteroalkyl, substituted or unsubstituted cycloalkyl, substituted or unsubstituted heterocycloalkyl, substituted or unsubstituted aryl (e.g., aryl substituted with 1-3 halogens), substituted or unsubstituted heteroaryl, substituted or unsubstituted alkyl, alkoxy, or thioalkoxy groups, or arylalkyl groups. When a compound described herein includes more than one R group, for example, each of the R groups is independently selected as are each R′, R″, R′″, and R′″ group when more than one of these groups is present. When R′ and R″ are attached to the same nitrogen atom, they can be combined with the nitrogen atom to form a 4-, 5-, 6-, or 7-membered ring. For example, NR′R″ includes, but is not limited to, 1-pyrrolidinyl and 4-morpholinyl. From the above discussion of substituents, one of skill in the art will understand that the term “alkyl” is meant to include groups including carbon atoms bound to groups other than hydrogen groups, such as haloalkyl (e.g., —CF₃ and —CH₂CF₃) and acyl (e.g., —C(O)CH₃, C(O)CF₃, C(O)CH₂OCH₃, and the like).

[0325] Certain compounds provided herein possess asymmetric carbon atoms (optical or chiral centers) or double bonds; the enantiomers, racemates, diastereomers, tautomers, geometric isomers, stereoisomeric forms that may be defined, in terms of absolute stereochemistry, as (R)- or (S)- or, as (D)- or (L)- for amino acids, and individual isomers are encompassed within the scope of the present disclosure. The compounds of provided herein do not include those that are known in art to be too unstable to synthesize and/or isolate. Compounds provided herein include those in racemic and optically pure forms. Optically active (R)- and (S)-, or (D)- and (L)-isomers may be prepared using chiral synthons or chiral reagents, or resolved using conventional techniques. When the compounds described herein contain olefinic bonds (vinyl group) and unless specified otherwise, it is intended that the compounds include both (E) and (Z) geometric isomers.

[0326] As used herein, the term “isomers” refers to compounds having the same number and kind of atoms, and hence the same molecular weight, but differing in respect to the structural arrangement or configuration of the atoms.

### RNAi Agents

[0327] In an aspect, the disclosure provides an RNAi agent including a double stranded RNA (dsRNA). In an aspect, also provided is a dsRNA interference (dsRNAi) agent that includes a dsRNA consisting of (i) a sense strand and (ii) an antisense strand, and a ligand attached to at least one of the sense strand and the antisense strand.

[0328] A dsRNA is a complex of ribonucleic acid (RNA) molecules formed in a duplex structure. In certain aspects, the dsRNA may be a small interfering RNA (siRNA) that has 10 to 30, or particularly 15-25 nucleotides in each RNA molecule, respectively, “passenger strand” and “guide strand”, and can be incorporated into an RNA-induced silencing complex (RISC). The siRNA is dissociated or unwounded in the RISC, and the passenger strand is degraded while the guide strand remains in the RISC pathway. The guide strand can subsequently bind to an mRNA molecule that includes a complementary sequence to the guide strand and induce or initiate cleavage or degradation of the mRNA molecule. In certain aspects, the mRNA encodes a target gene (e.g., mRNA transcript of a target gene) such that expression of the target gene is suppressed or inhibited through a post-transcriptional gene-silencing (“RNA silencing”). A guide RNA molecule has a complementary sequence to a target mRNA sequence and has anti-parallel orientation to the target gene, so it is interchangeably referred to as an antisense strand. A passenger RNA molecule forming a duplex with the guide RNA and having a complementary sequence to the guide strand (antisense strand) has the same orientation with the target mRNA sequence, so it is interchangeably referred to as a sense strand.

PCSK9 siRNA (Double Stranded RNA)

[0329] In an aspect, the disclosure provides a dsRNA interference (dsRNAi) agent that is capable of interacting or recruiting a target mRNA sequence, e.g., PCSK9 mRNA sequence, in the RISC thereby cleaving the target mRNA. The dsRNAi agent can silence PCSK9 gene, e.g., by inhibiting, downregulating, or suppressing the expression of PCSK9 gene. Gene-silencing (e.g., inhibiting, downregulating, or suppressing of the gene) may be assessed by a decrease in an absolute or relative level of one or more variables that are associated with PCSK9 expression compared with a control level. The control level may be any type obtained from, e.g., a pre-dose baseline level, or a level determined from a similar subject, cell, or untreated or treated subject with inactive agents (e.g., PBS buffer). In some embodiments, the level of silencing the PCSK9 may be demonstrated by a reduction of the amount of a total PCSK9 mRNA in a cell. In some embodiments, the level of silencing the PCSK9 may be demonstrated by a reduction of the amount of a total PCSK9 protein in a cell.

[0330] In some embodiments, expression of the PCSK9 gene (e.g., human PCSK9) is inhibited by at least about 10%, about 15%, about 20%, about 25%, about 30%, about 40%, about 50%, about 55%, about 60%, about 65%, about 70%, about 75%, about 80%, about 85%, about 90%, or about 95% based on the expression level of the PCSK9 gene in untreated cell or subject. In some embodiments, expression of the PCSK9 gene (e.g., human PCSK9) is inhibited by at least about 20% based on the expression level of the PCSK9 gene in untreated cell or subject. In some embodiments, expression of the PCSK9 gene (e.g., human PCSK9) is inhibited by at least about 30% based on the expression level of the PCSK9 gene in untreated cell or subject. In some embodiments, expression of the PCSK9 gene (e.g., human PCSK9) is inhibited by at least about 40% based on the expression level of the PCSK9 gene in untreated cell or subject. In some embodiments, expression of the PCSK9 gene (e.g., human PCSK9) is inhibited by at least about 50% based on the expression level of the PCSK9 gene in untreated cell or subject. In some embodiments, expression of the PCSK9 gene (e.g., human PCSK9) is inhibited by at least about 60% based on the expression level of the PCSK9 gene in untreated cell or subject. In some embodiments, expression of the PCSK9 gene (e.g., human PCSK9) is inhibited by at least about 70% based on the expression level of the PCSK9 gene in untreated cell or subject.

[0331] In some embodiments, inhibition of the expression of the PCSK9 gene may be manifested by a reduction of the amount of mRNA expressed in a first cell or a first group of cells obtained from a subject that has been treated, e.g., by contacting the cell or by administering the dsRNAi agent as described herein, as compared to a second cell or a second group of cells obtained from a subject that has not been treated but is identical to the first cell or the first group of cells. For example, the level of gene-silencing (e.g., inhibiting, downregulating, or suppressing of the gene) of the PCSK9 (e.g., human PCSK9) may be presented as a percentage of remaining mRNA in the treated cells (first cell or group of cells) compared to the mRNA amount in the control (untreated) cells, as shown in the following equation:

$$\frac{( mRNA in control cells ) - ( mRNA in treated cells )}{( mRNA in control cells )} •100 \% .$$

[0332] In some embodiments, the level of gene-silencing (e.g., inhibiting, downregulating, or suppressing of the gene) of the PCSK9 (e.g., human PCSK9) may be assessed by measuring a parameter or biomarker, e.g., human PCSK9 protein level, in a biological sample (e.g., e.g., a blood, serum or liver tissue obtained from a subject), which may be treated or untreated. Conventional analytical methods as known in the art such as electrophoresis (e.g., SDS or capillary electrophoresis), chromatography (e.g., high performance liquid chromatography (HPLC)), spectroscopy, western blotting, enzyme-linked immunosorbent assays (ELISAs), immunofluorescent assays, electrochemiluminescence assays, and the like can be used without limitation, but examples are not limited thereto. In some embodiments, reduced level of gene-silencing (e.g., inhibiting, downregulating, or suppressing of the gene) of the PCSK9 (e.g., human PCSK9) may be observed or assessed by in a liver (tissue) biopsy of the treated subject.

[0333] In certain aspects, the dsRNAi agent is a free acid. In certain aspects, the dsRNAi agent is in a salt form (e.g., a pharmaceutically acceptable salt form). It will be understood that references to dsRNAi agent are meant to also include the pharmaceutically acceptable salts of the dsRNAi agent. If the dsRNAi agent has, for example, at least one basic center, they can form acid addition salts. Corresponding acid addition salts can also be formed having, if desired, an additionally present basic center. Active substances having an acid group, e.g., COOH, can form salts with bases. The dsRNAi agent or pharmaceutically acceptable salts thereof may also be used in form of a hydrate or include other solvents used for crystallization. In some embodiments, the RNAi agent is a sodium salt. In some embodiments, the dsRNAi agent is in a salt form (e.g., a pharmaceutically acceptable salt form), where the salt is sodium (Na⁺), ammonium (NH₄⁺), calcium (Ca²⁺), iron (Fe²⁺ or Fe³⁺), magnesium (Mg²⁺), potassium (K⁺), pyridinium (C₅H₅NH⁺), quaternary ammonium (NR₄⁺, R being an alkyl group or an aryl group as described herein), or copper (Cu²⁺).

[0334] In an aspect, the disclosure provides a dsRNA having sequences (e.g., antisense strand sequence) that can recognize a specific region of a PCSK9 mRNA (e.g., human PCSK9 mRNA) and lead cleavage of the PCSK9 mRNA and silencing of the gene. The dsRNA includes a sense strand and an antisense strand and each strand may range from 12 to 30 nucleotides in length. In some embodiments, each strand may have 15 to 30 nucleotides in length. In some embodiments, each strand may have 15 to 25 nucleotides in length. In some embodiments, the antisense strand may have 15 to 25 nucleotides in length. In some embodiments, the sense strand may have 15 to 25 nucleotides in length. In some embodiments, the antisense strand may have 15 to 23 nucleotides in length. In some embodiments, the sense strand may have 15 to 23 nucleotides in length. In some embodiments, the antisense strand may have 18 to 25 nucleotides in length. In some embodiments, the sense strand may have 18 to 25 nucleotides in length.

[0335] In some embodiments, the sense strand may have 19 to 23 nucleotides in length. In some embodiments, the sense strand may have 21 to 23 nucleotides in length. In some embodiments, the sense strand may have 19 nucleotides in length. In some embodiments, the sense strand may have 20 nucleotides in length. In some embodiments, the sense strand may have 21 nucleotides in length. In some embodiments, the sense strand may have 22 nucleotides in length. In some embodiments, the sense strand may have 23 nucleotides in length.

[0336] In some embodiments, the antisense strand may have 19 to 25 nucleotides in length. In some embodiments, the antisense strand may have 19 to 23 nucleotides in length. In some embodiments, the antisense strand may have 21 to 23 nucleotides in length. In some embodiments, the antisense strand may have 23 to 25 nucleotides in length. In some embodiments, the antisense strand may have 19 nucleotides in length. In some embodiments, the antisense strand may have 20 nucleotides in length. In some embodiments, the antisense strand may have 21 nucleotides in length. In some embodiments, the antisense strand may have 22 nucleotides in length. In some embodiments, the antisense strand may have 23 nucleotides in length. In some embodiments, the antisense strand may have 24 nucleotides in length. In some embodiments, the antisense strand may have 25 nucleotides in length.

[0337] In some embodiments, the sense strand is 21 to 23 nucleotides in length and the antisense strand is 23 to 25 nucleotides in length. In some embodiments, the sense strand is 21 nucleotides in length and the antisense strand is 23 nucleotides in length. In some embodiments, the sense strand is 22 nucleotides in length and the antisense strand is 24 nucleotides in length. In some embodiments, the sense strand is 23 nucleotides in length and the antisense strand is 25 nucleotides in length.

[0338] In an aspect, a dsRNA as described herein forms a double-stranded (or “duplex”) region made between a sense strand and an antisense strand and having 10 to 25 nucleotide pairs in length. The double stranded or duplex region are loaded into the RISC and subsequent specific degradation of the sense strand occurs during the RISC pathway. In some embodiments, the double stranded region has 10 nucleotide base pairs in length. In some embodiments, the double stranded region has 11 nucleotide base pairs in length. In some embodiments, the double stranded region has 12 nucleotide base pairs in length. In some embodiments, the double stranded region has 13 nucleotide base pairs in length. In some embodiments, the double stranded region has 14 nucleotide base pairs in length. In some embodiments, the double stranded region has 15 nucleotide base pairs in length. In some embodiments, the double stranded region has 16 nucleotide base pairs in length. In some embodiments, the double stranded region has 17 nucleotide base pairs in length. In some embodiments, the double stranded region has 18 nucleotide base pairs in length. In some embodiments, the double stranded region has 19 nucleotide base pairs in length. In some embodiments, the double stranded region has 20 nucleotide base pairs in length. In some embodiments, the double stranded region has 21 nucleotide base pairs in length. In some embodiments, the double stranded region has 22 nucleotide base pairs in length. In some embodiments, the double stranded region has 23 nucleotide base pairs in length.

[0339] In an aspect, a dsRNA as described herein may include at least one single-stranded nucleotide overhang, for example, for increasing in vivo effectiveness of the dsRNA and having substantially improved inhibition of the target genes. In certain aspects, the dsRNA may contain one or more extra nucleotides constituting overhang regions that locate other than the double stranded region at the 3′-end, 5′-end, or both ends of either stand or both strands (sense and antisense strands). In some embodiments, the overhang region may exist at the 3′-end, 5′-end, or both ends of the sense strand. In some embodiments, the overhang region may exist at the 3′-end, 5′-end, or both ends of the antisense strand. In some embodiments, the antisense strand may have a greater length than a length in the sense strand. In some embodiments, the antisense strand may have a shorter length than a length in the sense strand.

[0340] In some embodiments, the dsRNA may contain one or more extra nucleotides constituting overhang regions at the 3′-end, 5′-end, or both ends of the antisense strand. In some embodiments, the overhang region in the antisense strand may consist of 1-6 nucleotides in length, for example, 1 nucleotide, 2 nucleotides, 3 nucleotides, 4 nucleotides, 5 nucleotides, or 6 nucleotides in length. In some embodiments, the dsRNA may contain one or more extra nucleotides constituting overhang regions at the 3′-end, 5′-end, or both ends of the sense strand. In some embodiments, the overhang region may consist of 1 to 6 nucleotides in length, for example, 1 nucleotide, 2 nucleotides, 3 nucleotides, 4 nucleotides, 5 nucleotides, or 6 nucleotides in length.

[0341] In some embodiments, the antisense strand may include one-nucleotide overhang at the 5′ end. In some embodiments, the antisense strand may include one-nucleotide overhang at the 3′ end. In some embodiments, the antisense strand may include two-nucleotides overhang. In some embodiments, the antisense contains two-nucleotides overhang at the 5′ end. In some embodiments, the antisense contains two-nucleotides overhang at the 3′ end. In some embodiments, the antisense contains one-nucleotide overhang at the 5′ end and one-nucleotide overhang at the 3′ end. In some embodiments, the antisense strand may include three-nucleotide overhang. In some embodiments, the antisense contains three-nucleotides overhang at the 5′ end. In some embodiments, the antisense contains three-nucleotides overhang at the 3′ end. In some embodiments, the antisense contains two-nucleotides overhang at the 5′ end and one-nucleotide overhang at the 3′ end. In some embodiments, the antisense contains two nucleotides overhang at the 3′ end and one-nucleotide overhang at the 5′ end.

[0342] In certain aspects, a dsRNA as described herein may include at least one blunt end, e.g., for increasing in vivo stability with resistance to degradation in physiological surroundings. In some embodiments, the dsRNA may have a blunt end at the 3′-end, 5′-end, or both ends of the duplex. In some embodiments, the dsRNA includes one overhang (e.g., at 3′ end of antisense strand) and one blunt end (e.g., at 5′ end of antisense strand). In some embodiments, the dsRNA includes a blunt end at the 5′-end of the sense strand (and at 3′ end of the antisense strand) and contain overhang nucleotide(s) at the other end. In some embodiments, the dsRNA may have a blunt end at the 3′-end of the sense strand (and at 5′ end of the antisense strand) and contain overhang nucleotide(s) at the other end.

[0343] In certain aspects, the target PCSK9 mRNA sequence may range from 12 to 30 nucleotides, from 15 to 30 nucleotides, from 18 to 30 nucleotides, from 18 to 25 nucleotides, from 18 to 23 nucleotides. In certain aspects, the target PCSK9 mRNA sequence may range from 19 to 25 nucleotides, from 19 to 23 nucleotides, or from 19 to 21 nucleotides. In some embodiments, the target PCSK9 mRNA sequence may have 15 nucleotides in length. In some embodiments, the target PCSK9 mRNA sequence may have 16 nucleotides in length. In some embodiments, the target PCSK9 mRNA sequence may have 17 nucleotides in length. In some embodiments, the target PCSK9 mRNA sequence may have 18 nucleotides in length. In some embodiments, the target PCSK9 mRNA sequence may have 19 nucleotides in length. In some embodiments, the target PCSK9 mRNA sequence may have 20 nucleotides in length. In some embodiments, the target PCSK9 mRNA sequence may have 21 nucleotides in length. In some embodiments, the target PCSK9 mRNA sequence may have 22 nucleotides in length. In some embodiments, the target PCSK9 mRNA sequence may have 23 nucleotides in length.

[0344] In certain aspects, exemplary dsRNA sequences including sense strands and antisense strands targeting human PCSK9 mRNAs of SEQ ID NO: 2 (GenBank: NM_174936.4) are in Table 1.

TABLE 1
Examples of unmodified nucleotide sequences of PCSK9 siRNA

| | Site | | | | | |
|---|---|---|---|---|---|---|
| | of | | | | | |
| | mRNA | | | SEQ | | SEQ |
| PCSK9 | Tar- | | | ID | | ID |
| SiRNA | get* | Region | Sense sequence | NO: | Antisense sequence | NO: |
| U1 | 27 | 5′ | GUCGAGGCGCUCAUG | 3 | UGCAACCAUGAGCGC | 382 |
| | | UTR | GUUGCA | | CUCGACGU | |
| U2 | 30 | 5′ | GAGGCGCUCAUGGUU | 4 | UCCUGCAACCAUGAG | 383 |
| | | UTR | GCAGGA | | CGCCUCGA | |
| U3 | 117 | 5′ | CGGGCCGGGACGCGU | 5 | UCAACGACGCGUCCC | 384 |
| | | UTR | CGUUGA | | GGCCCGCC | |
| U4 | 121 | 5′ | CCGGGACGCGUCGUU | 6 | UGCUGCAACGACGCG | 385 |
| | | UTR | GCAGCA | | UCCCGGCC | |
| U5 | 153 | 5′ | CUCCCAGCCAGGAUU | 7 | UCGCGGAAUCCUGGC | 386 |
| | | UTR | CCGCGA | | UGGGAGCU | |
| U6 | 155 | 5′ | CCCAGCCAGGAUUCC | 8 | UCGCGCGGAAUCCUG | 387 |
| | | UTR | GCGCGA | | GCUGGGAG | |
| U7 | 161 | 5′ | CAGGAUUCCGCGCGC | 9 | UAAGGGGCGCGCGGA | 388 |
| | | UTR | CCCUUA | | AUCCUGGC | |
| U8 | 219 | 5′ | CUCCCCACCGCAAGG | 10 | UUUGAGCCUUGCGGU | 389 |
| | | UTR | CUCAAA | | GGGGAGGA | |
| U9 | 220 | 5′ | UCCCCACCGCAAGGC | 11 | UCUUGAGCCUUGCGG | 390 |
| | | UTR | UCAAGG | | UGGGGAGG | |
| U10 | 256 | 5′ | CCGCGCACGGCCUCU | 12 | AGACCUAGAGGCCGU | 391 |
| | | UTR | AGGUCU | | GCGCGGUC | |
| U11 | 256 | 5′ | CCGCGCACGGCCUCU | 13 | UGACCUAGAGGCCGU | 392 |
| | | UTR | AGGUCA | | GCGCGGUC | |
| U12 | 257 | 5′ | CGCGCACGGCCUCUA | 14 | UAGACCUAGAGGCCG | 393 |
| | | UTR | GGUCUA | | UGCGCGGU | |
| U13 | 260 | 5′ | GCACGGCCUCUAGGU | 15 | UAGGAGACCUAGAGG | 394 |
| | | UTR | CUCCUA | | CCGUGCGC | |
| U14 | 316 | CDS | CACCGUCAGCUCCAG | 16 | UACCGCCUGGAGCUG | 395 |
| | | | GCGGUA | | ACGGUGCC | |
| U15 | 317 | CDS | ACCGUCAGCUCCAGG | 17 | UGACCGCCUGGAGCU | 396 |
| | | | CGGUCC | | GACGGUGC | |
| U16 | 318 | CDS | CCGUCAGCUCCAGGC | 18 | AGGACCGCCUGGAGC | 397 |
| | | | GGUCCU | | UGACGGUG | |
| U17 | 318 | CDS | CCGUCAGCUCCAGGC | 19 | UGGACCGCCUGGAGC | 398 |
| | | | GGUCCA | | UGACGGUG | |
| U18 | 378 | CDS | UGGGUCCCGCGGGCG | 20 | UACGGGCGCCCGCGG | 399 |
| | | | CCCGUG | | GACCCAGG | |
| U19 | 386 | CDS | GCGGGCGCCCGUGCG | 21 | UUCCUGCGCACGGGC | 400 |
| | | | CAGGAA | | GCCCGCGG | |
| U20 | 392 | CDS | GCCCGUGCGCAGGAG | 22 | UUCGUCCUCCUGCGC | 401 |
| | | | GACGAA | | ACGGGCGC | |
| U21 | 393 | CDS | CCCGUGCGCAGGAGG | 23 | UCUCGUCCUCCUGCG | 402 |
| | | | ACGAGA | | CACGGGCG | |
| U22 | 404 | CDS | GAGGACGAGGACGGC | 24 | UUAGUCGCCGUCCUC | 403 |
| | | | GACUAA | | GUCCUCCU | |
| U23 | 421 | CDS | CUACGAGGAGCUGGU | 25 | UCUAGCACCAGCUCC | 404 |
| | | | GCUAGA | | UCGUAGUC | |
| U24 | 425 | CDS | GAGGAGCUGGUGCUA | 26 | UAAGGCUAGCACCAG | 405 |
| | | | GCCUUA | | CUCCUCGU | |
| U25 | 430 | CDS | GCUGGUGCUAGCCUU | 27 | UAACGCAAGGCUAGC | 406 |
| | | | GCGUUA | | ACCAGCUC | |
| U26 | 432 | CDS | UGGUGCUAGCCUUGC | 28 | UGGAACGCAAGGCUA | 407 |
| | | | GUUCCG | | GCACCAGC | |
| U27 | 437 | CDS | CUAGCCUUGCGUUCC | 29 | UUCCUCGGAACGCAA | 408 |
| | | | GAGGAA | | GGCUAGCA | |
| U28 | 476 | CDS | CCCGAGCACGGAACC | 30 | UGCUGUGGUUCCGUG | 409 |
| | | | ACAGCA | | CUCGGGUG | |
| U29 | 479 | CDS | GAGCACGGAACCACA | 31 | UGUGGCUGUGGUUCC | 410 |
| | | | GCCACA | | GUGCUCGG | |
| U30 | 490 | CDS | CACAGCCACCUUCCA | 32 | UAGCGGUGGAAGGUG | 411 |
| | | | CCGCUA | | GCUGUGGU | |
| U31 | 496 | CDS | CACCUUCCACCGCUG | 33 | UUGGCGCAGCGGUGG | 412 |
| | | | CGCCAA | | AAGGUGGC | |
| U32 | 497 | CDS | ACCUUCCACCGCUGC | 34 | UUUGGCGCAGCGGUG | 413 |
| | | | GCCAAG | | GAAGGUGG | |
| U33 | 500 | CDS | UUCCACCGCUGCGCC | 35 | AUCCUUGGCGCAGCG | 414 |
| | | | AAGGAU | | GUGGAAGG | |
| U34 | 500 | CDS | UUCCACCGCUGCGCC | 36 | UUCCUUGGCGCAGCG | 415 |
| | | | AAGGAA | | GUGGAAGG | |
| U35 | 502 | CDS | CCACCGCUGCGCCAA | 37 | UGAUCCUUGGCGCAG | 416 |
| | | | GGAUCA | | CGGUGGAA | |
| U36 | 503 | CDS | CACCGCUGCGCCAAG | 38 | UGGAUCCUUGGCGCA | 417 |
| | | | GAUCCA | | GCGGUGGA | |
| U37 | 505 | CDS | CCGCUGCGCCAAGGA | 39 | UACGGAUCCUUGGCG | 418 |
| | | | UCCGUA | | CAGCGGUG | |
| U38 | 506 | CDS | CGCUGCGCCAAGGAU | 40 | UCACGGAUCCUUGGC | 419 |
| | | | CCGUGA | | GCAGCGGU | |
| U39 | 539 | CDS | ACCUACGUGGUGGUG | 41 | UUUCAGCACCACCAC | 420 |
| | | | CUGAAG | | GUAGGUGC | |
| U40 | 570 | CDS | ACCUCUCGCAGUCAG | 42 | UGCGCUCUGACUGCG | 421 |
| | | | AGCGCA | | AGAGGUGG | |
| U41 | 571 | CDS | CCUCUCGCAGUCAGA | 43 | UUGCGCUCUGACUGC | 422 |
| | | | GCGCAA | | GAGAGGUG | |
| U42 | 573 | CDS | UCUCGCAGUCAGAGC | 44 | UAGUGCGCUCUGACU | 423 |
| | | | GCACUG | | GCGAGAGG | |
| U43 | 611 | CDS | CAGGCUGCCCGCCGG | 45 | UUAUCCCCGGCGGGC | 424 |
| | | | GGAUAA | | AGCCUGGG | |
| U44 | 613 | CDS | GGCUGCCCGCCGGGG | 46 | AGGUAUCCCCGGCGG | 425 |
| | | | AUACCU | | GCAGCCUG | |
| U45 | 613 | CDS | GGCUGCCCGCCGGGG | 47 | UGGUAUCCCCGGCGG | 426 |
| | | | AUACCA | | GCAGCCUG | |
| U46 | 616 | CDS | UGCCCGCCGGGGAUA | 48 | UUGAGGUAUCCCCGG | 427 |
| | | | CCUCAC | | CGGGCAGC | |
| U47 | 620 | CDS | CGCCGGGGAUACCUC | 49 | UUUGGUGAGGUAUCC | 428 |
| | | | ACCAAA | | CCGGCGGG | |
| U48 | 621 | CDS | GCCGGGGAUACCUCA | 50 | UCUUGGUGAGGUAUC | 429 |
| | | | CCAAGA | | CCCGGCGG | |
| U49 | 623 | CDS | CGGGGAUACCUCACC | 51 | UAUCUUGGUGAGGUA | 430 |
| | | | AAGAUA | | UCCCCGGC | |
| U50 | 624 | CDS | GGGGAUACCUCACCA | 52 | UGAUCUUGGUGAGGU | 431 |
| | | | AGAUCA | | AUCCCCGG | |
| U51 | 668 | CDS | CCUGGCUUCCUGGUG | 53 | UAUCUUCACCAGGAA | 432 |
| | | | AAGAUA | | GCCAGGAA | |
| U52 | 680 | CDS | GUGAAGAUGAGUGGC | 54 | UAGGUCGCCACUCAU | 433 |
| | | | GACCUA | | CUUCACCA | |
| U53 | 683 | CDS | AAGAUGAGUGGCGAC | 55 | UAGCAGGUCGCCACU | 434 |
| | | | CUGCUG | | CAUCUUCA | |
| U54 | 709 | CDS | GGCCUUGAAGUUGCC | 56 | ACAUGGGGCAACUUC | 435 |
| | | | CCAUGU | | AAGGCCAG | |
| U55 | 709 | CDS | GGCCUUGAAGUUGCC | 57 | UCAUGGGGCAACUUC | 436 |
| | | | CCAUGA | | AAGGCCAG | |
| U56 | 711 | CDS | CCUUGAAGUUGCCCC | 58 | UGACAUGGGGCAACU | 437 |
| | | | AUGUCA | | UCAAGGCC | |
| U57 | 712 | CDS | CUUGAAGUUGCCCCA | 59 | UCGACAUGGGGCAAC | 438 |
| | | | UGUCGA | | UUCAAGGC | |
| U58 | 713 | CDS | UUGAAGUUGCCCCAU | 60 | UUCGACAUGGGGCAA | 439 |
| | | | GUCGAC | | CUUCAAGG | |
| U59 | 714 | CDS | UGAAGUUGCCCCAUG | 61 | AGUCGACAUGGGGCA | 440 |
| | | | UCGACU | | ACUUCAAG | |
| U60 | 714 | CDS | UGAAGUUGCCCCAUG | 62 | UGUCGACAUGGGGCA | 441 |
| | | | UCGACA | | ACUUCAAG | |
| U61 | 715 | CDS | GAAGUUGCCCCAUGU | 63 | UAGUCGACAUGGGGC | 442 |
| | | | CGACUA | | AACUUCAA | |
| U62 | 716 | CDS | AAGUUGCCCCAUGUC | 64 | UUAGUCGACAUGGGG | 443 |
| | | | GACUAC | | CAACUUCA | |
| U63 | 717 | CDS | AGUUGCCCCAUGUCG | 65 | UGUAGUCGACAUGGG | 444 |
| | | | ACUACA | | GCAACUUC | |
| U64 | 718 | CDS | GUUGCCCCAUGUCGA | 66 | AUGUAGUCGACAUGG | 445 |
| | | | CUACAU | | GGCAACUU | |
| U65 | 718 | CDS | GUUGCCCCAUGUCGA | 67 | UUGUAGUCGACAUGG | 446 |
| | | | CUACAA | | GGCAACUU | |
| U66 | 720 | CDS | UGCCCCAUGUCGACU | 68 | UGAUGUAGUCGACAU | 447 |
| | | | ACAUCG | | GGGGCAAC | |
| U67 | 721 | CDS | GCCCCAUGUCGACUA | 69 | UCGAUGUAGUCGACA | 448 |
| | | | CAUCGA | | UGGGGCAA | |
| U68 | 722 | CDS | CCCCAUGUCGACUAC | 70 | UUCGAUGUAGUCGAC | 449 |
| | | | AUCGAA | | AUGGGGCA | |
| U69 | 725 | CDS | CAUGUCGACUACAUC | 71 | UUCCUCGAUGUAGUC | 450 |
| | | | GAGGAA | | GACAUGGG | |
| U70 | 726 | CDS | AUGUCGACUACAUCG | 72 | UCUCCUCGAUGUAGU | 451 |
| | | | AGGAGG | | CGACAUGG | |
| U71 | 728 | CDS | GUCGACUACAUCGAG | 73 | UUCCUCCUCGAUGUA | 452 |
| | | | GAGGAA | | GUCGACAU | |
| U72 | 731 | CDS | GACUACAUCGAGGAG | 74 | UGAGUCCUCCUCGAU | 453 |
| | | | GACUCA | | GUAGUCGA | |
| U73 | 770 | CDS | AUCCCGUGGAACCUG | 75 | UCGCUCCAGGUUCCA | 454 |
| | | | GAGCGG | | CGGGAUGC | |
| U74 | 794 | CDS | ACCCCUCCACGGUAC | 76 | UGCCCGGUACCGUGG | 455 |
| | | | CGGGCG | | AGGGGUAA | |
| U75 | 795 | CDS | CCCCUCCACGGUACC | 77 | UCGCCCGGUACCGUG | 456 |
| | | | GGGCGA | | GAGGGGUA | |
| U76 | 796 | CDS | CCCUCCACGGUACCG | 78 | UCCGCCCGGUACCGU | 457 |
| | | | GGCGGA | | GGAGGGGU | |
| U77 | 798 | CDS | CUCCACGGUACCGGG | 79 | UAUCCGCCCGGUACC | 458 |
| | | | CGGAUA | | GUGGAGGG | |
| U78 | 799 | CDS | UCCACGGUACCGGGC | 80 | UCAUCCGCCCGGUAC | 459 |
| | | | GGAUGA | | CGUGGAGG | |
| U79 | 800 | CDS | CCACGGUACCGGGCG | 81 | UUCAUCCGCCCGGUA | 460 |
| | | | GAUGAA | | CCGUGGAG | |
| U80 | 801 | CDS | CACGGUACCGGGCGG | 82 | AUUCAUCCGCCCGGU | 461 |
| | | | AUGAAU | | ACCGUGGA | |
| U81 | 801 | CDS | CACGGUACCGGGCGG | 83 | UUUCAUCCGCCCGGU | 462 |
| | | | AUGAAA | | ACCGUGGA | |
| U82 | 802 | CDS | ACGGUACCGGGCGGA | 84 | UAUUCAUCCGCCCGG | 463 |
| | | | UGAAUA | | UACCGUGG | |
| U83 | 806 | CDS | UACCGGGCGGAUGAA | 85 | UUGGUAUUCAUCCGC | 464 |
| | | | UACCAG | | CCGGUACC | |
| U84 | 840 | CDS | GCAGCCUGGUGGAGG | 86 | UAUACACCUCCACCA | 465 |
| | | | UGUAUA | | GGCUGCCU | |
| U85 | 843 | CDS | GCCUGGUGGAGGUGU | 87 | UGAGAUACACCUCCA | 466 |
| | | | AUCUCA | | CCAGGCUG | |
| U86 | 847 | CDS | GGUGGAGGUGUAUCU | 88 | UCUAGGAGAUACACC | 467 |
| | | | CCUAGA | | UCCACCAG | |
| U87 | 848 | CDS | GUGGAGGUGUAUCUC | 89 | UUCUAGGAGAUACAC | 468 |
| | | | CUAGAA | | CUCCACCA | |
| U88 | 850 | CDS | GGAGGUGUAUCUCCU | 90 | UUGUCUAGGAGAUAC | 469 |
| | | | AGACAA | | ACCUCCAC | |
| U89 | 851 | CDS | GAGGUGUAUCUCCUA | 91 | UGUGUCUAGGAGAUA | 470 |
| | | | GACACA | | CACCUCCA | |
| U90 | 852 | CDS | AGGUGUAUCUCCUAG | 92 | UGGUGUCUAGGAGAU | 471 |
| | | | ACACCA | | ACACCUCC | |
| U91 | 853 | CDS | GGUGUAUCUCCUAGA | 93 | UUGGUGUCUAGGAGA | 472 |
| | | | CACCAA | | UACACCUC | |
| U92 | 856 | CDS | GUAUCUCCUAGACAC | 94 | AUGCUGGUGUCUAGG | 473 |
| | | | CAGCAU | | AGAUACAC | |
| U93 | 856 | CDS | GUAUCUCCUAGACAC | 95 | UUGCUGGUGUCUAGG | 474 |
| | | | CAGCAA | | AGAUACAC | |
| U94 | 857 | CDS | UAUCUCCUAGACACC | 96 | UAUGCUGGUGUCUAG | 475 |
| | | | AGCAUA | | GAGAUACA | |
| U95 | 858 | CDS | AUCUCCUAGACACCA | 97 | UUAUGCUGGUGUCUA | 476 |
| | | | GCAUAC | | GGAGAUAC | |
| U96 | 862 | CDS | CCUAGACACCAGCAU | 98 | UUCUGUAUGCUGGUG | 477 |
| | | | ACAGAA | | UCUAGGAG | |
| U97 | 868 | CDS | CACCAGCAUACAGAG | 99 | UGGUCACUCUGUAUG | 478 |
| | | | UGACCA | | CUGGUGUC | |
| U98 | 870 | CDS | CCAGCAUACAGAGUG | 100 | UGUGGUCACUCUGUA | 479 |
| | | | ACCACA | | UGCUGGUG | |
| U99 | 873 | CDS | GCAUACAGAGUGACC | 101 | UCCGGUGGUCACUCU | 480 |
| | | | ACCGGA | | GUAUGCUG | |
| U100 | 875 | CDS | AUACAGAGUGACCAC | 102 | UUCCCGGUGGUCACU | 481 |
| | | | CGGGAA | | CUGUAUGC | |
| U101 | 876 | CDS | UACAGAGUGACCACC | 103 | UUUCCCGGUGGUCAC | 482 |
| | | | GGGAAA | | UCUGUAUG | |
| U102 | 878 | CDS | CAGAGUGACCACCGG | 104 | UAUUUCCCGGUGGUC | 483 |
| | | | GAAAUA | | ACUCUGUA | |
| U103 | 879 | CDS | AGAGUGACCACCGGG | 105 | UGAUUUCCCGGUGGU | 484 |
| | | | AAAUCG | | CACUCUGU | |
| U104 | 880 | CDS | GAGUGACCACCGGGA | 106 | UCGAUUUCCCGGUGG | 485 |
| | | | AAUCGA | | UCACUCUG | |
| U105 | 881 | CDS | AGUGACCACCGGGAA | 107 | UUCGAUUUCCCGGUG | 486 |
| | | | AUCGAG | | GUCACUCU | |
| U106 | 882 | CDS | GUGACCACCGGGAAA | 108 | UCUCGAUUUCCCGGU | 487 |
| | | | UCGAGA | | GGUCACUC | |
| U107 | 883 | CDS | UGACCACCGGGAAAU | 109 | UCCUCGAUUUCCCGG | 488 |
| | | | CGAGGG | | UGGUCACU | |
| U108 | 892 | CDS | GGAAAUCGAGGGCAG | 110 | AUGACCCUGCCCUCG | 489 |
| | | | GGUCAU | | AUUUCCCG | |
| U109 | 892 | CDS | GGAAAUCGAGGGCAG | 111 | UUGACCCUGCCCUCG | 490 |
| | | | GGUCAA | | AUUUCCCG | |
| U110 | 893 | CDS | GAAAUCGAGGGCAGG | 112 | UAUGACCCUGCCCUC | 491 |
| | | | GUCAUA | | GAUUUCCC | |
| U111 | 894 | CDS | AAAUCGAGGGCAGGG | 113 | UCAUGACCCUGCCCU | 492 |
| | | | UCAUGG | | CGAUUUCC | |
| U112 | 896 | CDS | AUCGAGGGCAGGGUC | 114 | UACCAUGACCCUGCC | 493 |
| | | | AUGGUC | | CUCGAUUU | |
| U113 | 900 | CDS | AGGGCAGGGUCAUGG | 115 | UGGUGACCAUGACCC | 494 |
| | | | UCACCG | | UGCCCUCG | |
| U114 | 902 | CDS | GGCAGGGUCAUGGUC | 116 | UUCGGUGACCAUGAC | 495 |
| | | | ACCGAA | | CCUGCCCU | |
| U115 | 903 | CDS | GCAGGGUCAUGGUCA | 117 | AGUCGGUGACCAUGA | 496 |
| | | | CCGACU | | CCCUGCCC | |
| U116 | 903 | CDS | GCAGGGUCAUGGUCA | 118 | UGUCGGUGACCAUGA | 497 |
| | | | CCGACA | | CCCUGCCC | |
| U117 | 904 | CDS | CAGGGUCAUGGUCAC | 119 | AAGUCGGUGACCAUG | 498 |
| | | | CGACUU | | ACCCUGCC | |
| U118 | 904 | CDS | CAGGGUCAUGGUCAC | 120 | UAGUCGGUGACCAUG | 499 |
| | | | CGACUA | | ACCCUGCC | |
| U119 | 945 | CDS | ACGGGACCCGCUUCC | 121 | UUCUGUGGAAGCGGG | 500 |
| | | | ACAGAC | | UCCCGUCC | |
| U120 | 946 | CDS | CGGGACCCGCUUCCA | 122 | UGUCUGUGGAAGCGG | 501 |
| | | | CAGACA | | GUCCCGUC | |
| U121 | 960 | CDS | ACAGACAGGCCAGCA | 123 | UACACUUGCUGGCCU | 502 |
| | | | AGUGUG | | GUCUGUGG | |
| U122 | 976 | CDS | GUGUGACAGUCAUGG | 124 | UGGGUGCCAUGACUG | 503 |
| | | | CACCCA | | UCACACUU | |
| U123 | 993 | CDS | CCCACCUGGCAGGGG | 125 | UGACCACCCCUGCCA | 504 |
| | | | UGGUCA | | GGUGGGUG | |
| U124 | 994 | CDS | CCACCUGGCAGGGGU | 126 | UUGACCACCCCUGCC | 505 |
| | | | GGUCAA | | AGGUGGGU | |
| U125 | 1054 | CDS | CAGCCUGCGCGUGCU | 127 | UAGUUGAGCACGCGC | 506 |
| | | | CAACUA | | AGGCUGCG | |
| U126 | 1055 | CDS | AGCCUGCGCGUGCUC | 128 | UCAGUUGAGCACGCG | 507 |
| | | | AACUGC | | CAGGCUGC | |
| U127 | 1059 | CDS | UGCGCGUGCUCAACU | 129 | UUUGGCAGUUGAGCA | 508 |
| | | | GCCAAG | | CGCGCAGG | |
| U128 | 1060 | CDS | GCGCGUGCUCAACUG | 130 | UCUUGGCAGUUGAGC | 509 |
| | | | CCAAGA | | ACGCGCAG | |
| U129 | 1070 | CDS | AACUGCCAAGGGAAG | 131 | UGUGCCCUUCCCUUG | 510 |
| | | | GGCACG | | GCAGUUGA | |
| U130 | 1071 | CDS | ACUGCCAAGGGAAGG | 132 | UCGUGCCCUUCCCUU | 511 |
| | | | GCACGG | | GGCAGUUG | |
| U131 | 1081 | CDS | GAAGGGCACGGUUAG | 133 | UUGCCGCUAACCGUG | 512 |
| | | | CGGCAA | | CCCUUCCC | |
| U132 | 1082 | CDS | AAGGGCACGGUUAGC | 134 | UGUGCCGCUAACCGU | 513 |
| | | | GGCACC | | GCCCUUCC | |
| U133 | 1085 | CDS | GGCACGGUUAGCGGC | 135 | UAGGGUGCCGCUAAC | 514 |
| | | | ACCCUA | | CGUGCCCU | |
| U134 | 1088 | CDS | ACGGUUAGCGGCACC | 136 | UAUGAGGGUGCCGCU | 515 |
| | | | CUCAUA | | AACCGUGC | |
| U135 | 1089 | CDS | CGGUUAGCGGCACCC | 137 | UUAUGAGGGUGCCGC | 516 |
| | | | UCAUAA | | UAACCGUG | |
| U136 | 1090 | CDS | GGUUAGCGGCACCCU | 138 | UCUAUGAGGGUGCCG | 517 |
| | | | CAUAGA | | CUAACCGU | |
| U137 | 1097 | CDS | GGCACCCUCAUAGGC | 139 | UUCCAGGCCUAUGAG | 518 |
| | | | CUGGAA | | GGUGCCGC | |
| U138 | 1099 | CDS | CACCCUCAUAGGCCU | 140 | AACUCCAGGCCUAUG | 519 |
| | | | GGAGUU | | AGGGUGCC | |
| U139 | 1100 | CDS | ACCCUCAUAGGCCUG | 141 | AAACUCCAGGCCUAU | 520 |
| | | | GAGUUU | | GAGGGUGC | |
| U140 | 1102 | CDS | CCUCAUAGGCCUGGA | 142 | AUAAACUCCAGGCCU | 521 |
| | | | GUUUAU | | AUGAGGGU | |
| U141 | 1102 | CDS | CCUCAUAGGCCUGGA | 143 | UUAAACUCCAGGCCU | 522 |
| | | | GUUUAA | | AUGAGGGU | |
| U142 | 1106 | CDS | AUAGGCCUGGAGUUU | 144 | UCGAAUAAACUCCAG | 523 |
| | | | AUUCGG | | GCCUAUGA | |
| U143 | 1107 | CDS | UAGGCCUGGAGUUUA | 145 | UCCGAAUAAACUCCA | 524 |
| | | | UUCGGA | | GGCCUAUG | |
| U144 | 1108 | CDS | AGGCCUGGAGUUUAU | 146 | UUCCGAAUAAACUCC | 525 |
| | | | UCGGAA | | AGGCCUAU | |
| U145 | 1111 | CDS | CCUGGAGUUUAUUCG | 147 | UUUUUCCGAAUAAAC | 526 |
| | | | GAAAAA | | UCCAGGCC | |
| U146 | 1112 | CDS | CUGGAGUUUAUUCGG | 148 | UCUUUUCCGAAUAAA | 527 |
| | | | AAAAGA | | CUCCAGGC | |
| U147 | 1113 | CDS | UGGAGUUUAUUCGGA | 149 | UGCUUUUCCGAAUAA | 528 |
| | | | AAAGCC | | ACUCCAGG | |
| U148 | 1118 | CDS | UUUAUUCGGAAAAGC | 150 | UAGCUGGCUUUUCCG | 529 |
| | | | CAGCUG | | AAUAAACU | |
| U149 | 1168 | CDS | GCUGCCCCUGGCGGG | 151 | UACCCACCCGCCAGG | 530 |
| | | | UGGGUA | | GGCAGCAG | |
| U150 | 1169 | CDS | CUGCCCCUGGCGGGU | 152 | UUACCCACCCGCCAG | 531 |
| | | | GGGUAA | | GGGCAGCA | |
| U151 | 1170 | CDS | UGCCCCUGGCGGGUG | 153 | UGUACCCACCCGCCA | 532 |
| | | | GGUACA | | GGGGCAGC | |
| U152 | 1221 | CDS | UGGCGAGGGCUGGGG | 154 | UCACGACCCCAGCCC | 533 |
| | | | UCGUGC | | UCGCCAGG | |
| U153 | 1228 | CDS | GGCUGGGGUCGUGCU | 155 | UUGACCAGCACGACC | 534 |
| | | | GGUCAA | | CCAGCCCU | |
| U154 | 1234 | CDS | GGUCGUGCUGGUCAC | 156 | UCAGCGGUGACCAGC | 535 |
| | | | CGCUGA | | ACGACCCC | |
| U155 | 1237 | CDS | CGUGCUGGUCACCGC | 157 | UCGGCAGCGGUGACC | 536 |
| | | | UGCCGA | | AGCACGAC | |
| U156 | 1238 | CDS | GUGCUGGUCACCGCU | 158 | UCCGGCAGCGGUGAC | 537 |
| | | | GCCGGA | | CAGCACGA | |
| U157 | 1241 | CDS | CUGGUCACCGCUGCC | 159 | UUUGCCGGCAGCGGU | 538 |
| | | | GGCAAA | | GACCAGCA | |
| U158 | 1246 | CDS | CACCGCUGCCGGCAA | 160 | UGGAAGUUGCCGGCA | 539 |
| | | | CUUCCA | | GCGGUGAC | |
| U159 | 1252 | CDS | UGCCGGCAACUUCCG | 161 | UCGUCCCGGAAGUUG | 540 |
| | | | GGACGA | | CCGGCAGC | |
| U160 | 1253 | CDS | GCCGGCAACUUCCGG | 162 | AUCGUCCCGGAAGUU | 541 |
| | | | GACGAU | | GCCGGCAG | |
| U161 | 1253 | CDS | GCCGGCAACUUCCGG | 163 | UUCGUCCCGGAAGUU | 542 |
| | | | GACGAA | | GCCGGCAG | |
| U162 | 1254 | CDS | CCGGCAACUUCCGGG | 164 | UAUCGUCCCGGAAGU | 543 |
| | | | ACGAUA | | UGCCGGCA | |
| U163 | 1255 | CDS | CGGCAACUUCCGGGA | 165 | UCAUCGUCCCGGAAG | 544 |
| | | | CGAUGA | | UUGCCGGC | |
| U164 | 1256 | CDS | GGCAACUUCCGGGAC | 166 | UGCAUCGUCCCGGAA | 545 |
| | | | GAUGCA | | GUUGCCGG | |
| U165 | 1257 | CDS | GCAACUUCCGGGACG | 167 | AGGCAUCGUCCCGGA | 546 |
| | | | AUGCCU | | AGUUGCCG | |
| U166 | 1257 | CDS | GCAACUUCCGGGACG | 168 | UGGCAUCGUCCCGGA | 547 |
| | | | AUGCCA | | AGUUGCCG | |
| U167 | 1258 | CDS | CAACUUCCGGGACGA | 169 | UAGGCAUCGUCCCGG | 548 |
| | | | UGCCUA | | AAGUUGCC | |
| U168 | 1260 | CDS | ACUUCCGGGACGAUG | 170 | UGCAGGCAUCGUCCC | 549 |
| | | | CCUGCC | | GGAAGUUG | |
| U169 | 1292 | CDS | GCCUCAGCUCCCGAG | 171 | UAUGACCUCGGGAGC | 550 |
| | | | GUCAUA | | UGAGGCUG | |
| U170 | 1293 | CDS | CCUCAGCUCCCGAGG | 172 | UGAUGACCUCGGGAG | 551 |
| | | | UCAUCA | | CUGAGGCU | |
| U171 | 1296 | CDS | CAGCUCCCGAGGUCA | 173 | UUGUGAUGACCUCGG | 552 |
| | | | UCACAA | | GAGCUGAG | |
| U172 | 1299 | CDS | CUCCCGAGGUCAUCA | 174 | UAACUGUGAUGACCU | 553 |
| | | | CAGUUA | | CGGGAGCU | |
| U173 | 1308 | CDS | UCAUCACAGUUGGGG | 175 | UGGUGGCCCCAACUG | 554 |
| | | | CCACCA | | UGAUGACC | |
| U174 | 1309 | CDS | CAUCACAGUUGGGGC | 176 | UUGGUGGCCCCAACU | 555 |
| | | | CACCAA | | GUGAUGAC | |
| U175 | 1354 | CDS | GGGGACUUUGGGGAC | 177 | AAGUUGGUCCCCAAA | 556 |
| | | | CAACUU | | GUCCCCAG | |
| U176 | 1354 | CDS | GGGGACUUUGGGGAC | 178 | UAGUUGGUCCCCAAA | 557 |
| | | | CAACUA | | GUCCCCAG | |
| U177 | 1355 | CDS | GGGACUUUGGGGACC | 179 | AAAGUUGGUCCCCAA | 558 |
| | | | AACUUU | | AGUCCCCA | |
| U178 | 1355 | CDS | GGGACUUUGGGGACC | 180 | UAAGUUGGUCCCCAA | 559 |
| | | | AACUUA | | AGUCCCCA | |
| U179 | 1357 | CDS | GACUUUGGGGACCAA | 181 | UCAAAGUUGGUCCCC | 560 |
| | | | CUUUGA | | AAAGUCCC | |
| U180 | 1359 | CDS | CUUUGGGGACCAACU | 182 | UGCCAAAGUUGGUCC | 561 |
| | | | UUGGCA | | CCAAAGUC | |
| U181 | 1361 | CDS | UUGGGGACCAACUUU | 183 | UCGGCCAAAGUUGGU | 562 |
| | | | GGCCGC | | CCCCAAAG | |
| U182 | 1365 | CDS | GGACCAACUUUGGCC | 184 | UACAGCGGCCAAAGU | 563 |
| | | | GCUGUA | | UGGUCCCC | |
| U183 | 1367 | CDS | ACCAACUUUGGCCGC | 185 | UACACAGCGGCCAAA | 564 |
| | | | UGUGUG | | GUUGGUCC | |
| U184 | 1376 | CDS | GGCCGCUGUGUGGAC | 186 | AAAGAGGUCCACACA | 565 |
| | | | CUCUUU | | GCGGCCAA | |
| U185 | 1376 | CDS | GGCCGCUGUGUGGAC | 187 | UAAGAGGUCCACACA | 566 |
| | | | CUCUUA | | GCGGCCAA | |
| U186 | 1378 | CDS | CCGCUGUGUGGACCU | 188 | UCAAAGAGGUCCACA | 567 |
| | | | CUUUGA | | CAGCGGCC | |
| U187 | 1379 | CDS | CGCUGUGUGGACCUC | 189 | UGCAAAGAGGUCCAC | 568 |
| | | | UUUGCA | | ACAGCGGC | |
| U188 | 1401 | CDS | CAGGGGAGGACAUCA | 190 | UACCAAUGAUGUCCU | 569 |
| | | | UUGGUA | | CCCCUGGG | |
| U189 | 1409 | CDS | GACAUCAUUGGUGCC | 191 | UCUGGAGGCACCAAU | 570 |
| | | | UCCAGA | | GAUGUCCU | |
| U190 | 1414 | CDS | CAUUGGUGCCUCCAG | 192 | UAGUCGCUGGAGGCA | 571 |
| | | | CGACUA | | CCAAUGAU | |
| U191 | 1430 | CDS | GACUGCAGCACCUGC | 193 | UACAAAGCAGGUGCU | 572 |
| | | | UUUGUA | | GCAGUCGC | |
| U192 | 1433 | CDS | UGCAGCACCUGCUUU | 194 | UGACACAAAGCAGGU | 573 |
| | | | GUGUCA | | GCUGCAGU | |
| U193 | 1435 | CDS | CAGCACCUGCUUUGU | 195 | UGUGACACAAAGCAG | 574 |
| | | | GUCACA | | GUGCUGCA | |
| U194 | 1478 | CDS | GCCCACGUGGCUGGC | 196 | UGCAAUGCCAGCCAC | 575 |
| | | | AUUGCA | | GUGGGCAG | |
| U195 | 1488 | CDS | CUGGCAUUGCAGCCA | 197 | UCAUCAUGGCUGCAA | 576 |
| | | | UGAUGA | | UGCCAGCC | |
| U196 | 1489 | CDS | UGGCAUUGCAGCCAU | 198 | AGCAUCAUGGCUGCA | 577 |
| | | | GAUGCU | | AUGCCAGC | |
| U197 | 1489 | CDS | UGGCAUUGCAGCCAU | 199 | UGCAUCAUGGCUGCA | 578 |
| | | | GAUGCA | | AUGCCAGC | |
| U198 | 1494 | CDS | UUGCAGCCAUGAUGC | 200 | UAGACAGCAUCAUGG | 579 |
| | | | UGUCUG | | CUGCAAUG | |
| U199 | 1502 | CDS | AUGAUGCUGUCUGCC | 201 | UGGCUCGGCAGACAG | 580 |
| | | | GAGCCG | | CAUCAUGG | |
| U200 | 1504 | CDS | GAUGCUGUCUGCCGA | 202 | UCCGGCUCGGCAGAC | 581 |
| | | | GCCGGA | | AGCAUCAU | |
| U201 | 1505 | CDS | AUGCUGUCUGCCGAG | 203 | UUCCGGCUCGGCAGA | 582 |
| | | | CCGGAG | | CAGCAUCA | |
| U202 | 1522 | CDS | GGAGCUCACCCUGGC | 204 | AACUCGGCCAGGGUG | 583 |
| | | | CGAGUU | | AGCUCCGG | |
| U203 | 1522 | CDS | GGAGCUCACCCUGGC | 205 | UACUCGGCCAGGGUG | 584 |
| | | | CGAGUA | | AGCUCCGG | |
| U204 | 1523 | CDS | GAGCUCACCCUGGCC | 206 | UAACUCGGCCAGGGU | 585 |
| | | | GAGUUA | | GAGCUCCG | |
| U205 | 1526 | CDS | CUCACCCUGGCCGAG | 207 | UCUCAACUCGGCCAG | 586 |
| | | | UUGAGA | | GGUGAGCU | |
| U206 | 1533 | CDS | UGGCCGAGUUGAGGC | 208 | UUCUCUGCCUCAACU | 587 |
| | | | AGAGAC | | CGGCCAGG | |
| U207 | 1538 | CDS | GAGUUGAGGCAGAGA | 209 | UAUCAGUCUCUGCCU | 588 |
| | | | CUGAUA | | CAACUCGG | |
| U208 | 1546 | CDS | GCAGAGACUGAUCCA | 210 | UAGAAGUGGAUCAGU | 589 |
| | | | CUUCUA | | CUCUGCCU | |
| U209 | 1547 | CDS | CAGAGACUGAUCCAC | 211 | AGAGAAGUGGAUCAG | 590 |
| | | | UUCUCU | | UCUCUGCC | |
| U210 | 1547 | CDS | CAGAGACUGAUCCAC | 212 | UGAGAAGUGGAUCAG | 591 |
| | | | UUCUCA | | UCUCUGCC | |
| U211 | 1548 | CDS | AGAGACUGAUCCACU | 213 | UAGAGAAGUGGAUCA | 592 |
| | | | UCUCUG | | GUCUCUGC | |
| U212 | 1562 | CDS | UUCUCUGCCAAAGAU | 214 | UAUGACAUCUUUGGC | 593 |
| | | | GUCAUC | | AGAGAAGU | |
| U213 | 1571 | CDS | AAAGAUGUCAUCAAU | 215 | UGCCUCAUUGAUGAC | 594 |
| | | | GAGGCC | | AUCUUUGG | |
| U214 | 1577 | CDS | GUCAUCAAUGAGGCC | 216 | UAACCAGGCCUCAUU | 595 |
| | | | UGGUUA | | GAUGACAU | |
| U215 | 1578 | CDS | UCAUCAAUGAGGCCU | 217 | UGAACCAGGCCUCAU | 596 |
| | | | GGUUCC | | UGAUGACA | |
| U216 | 1598 | CDS | CCUGAGGACCAGCGG | 218 | UAGUACCCGCUGGUC | 597 |
| | | | GUACUA | | CUCAGGGA | |
| U217 | 1600 | CDS | UGAGGACCAGCGGGU | 219 | UUCAGUACCCGCUGG | 598 |
| | | | ACUGAC | | UCCUCAGG | |
| U218 | 1601 | CDS | GAGGACCAGCGGGUA | 220 | UGUCAGUACCCGCUG | 599 |
| | | | CUGACA | | GUCCUCAG | |
| U219 | 1603 | CDS | GGACCAGCGGGUACU | 221 | UGGGUCAGUACCCGC | 600 |
| | | | GACCCA | | UGGUCCUC | |
| U220 | 1695 | CDS | CAGCACACUCGGGGC | 222 | UUGUAGGCCCCGAGU | 601 |
| | | | CUACAA | | GUGCUGAC | |
| U221 | 1696 | CDS | AGCACACUCGGGGCC | 223 | UGUGUAGGCCCCGAG | 602 |
| | | | UACACG | | UGUGCUGA | |
| U222 | 1697 | CDS | GCACACUCGGGGCCU | 224 | UCGUGUAGGCCCCGA | 603 |
| | | | ACACGA | | GUGUGCUG | |
| U223 | 1698 | CDS | CACACUCGGGGCCUA | 225 | UCCGUGUAGGCCCCG | 604 |
| | | | CACGGA | | AGUGUGCU | |
| U224 | 1699 | CDS | ACACUCGGGGCCUAC | 226 | AUCCGUGUAGGCCCC | 605 |
| | | | ACGGAU | | GAGUGUGC | |
| U225 | 1699 | CDS | ACACUCGGGGCCUAC | 227 | UUCCGUGUAGGCCCC | 606 |
| | | | ACGGAA | | GAGUGUGC | |
| U226 | 1700 | CDS | CACUCGGGGCCUACA | 228 | UAUCCGUGUAGGCCC | 607 |
| | | | CGGAUA | | CGAGUGUG | |
| U227 | 1703 | CDS | UCGGGGCCUACACGG | 229 | UGCCAUCCGUGUAGG | 608 |
| | | | AUGGCC | | CCCCGAGU | |
| U228 | 1708 | CDS | GCCUACACGGAUGGC | 230 | UCUGUGGCCAUCCGU | 609 |
| | | | CACAGA | | GUAGGCCC | |
| U229 | 1709 | CDS | CCUACACGGAUGGCC | 231 | UGCUGUGGCCAUCCG | 610 |
| | | | ACAGCA | | UGUAGGCC | |
| U230 | 1756 | CDS | GCUGCUGAGCUGCUC | 232 | AAACUGGAGCAGCUC | 611 |
| | | | CAGUUU | | AGCAGCUC | |
| U231 | 1756 | CDS | GCUGCUGAGCUGCUC | 233 | UAACUGGAGCAGCUC | 612 |
| | | | CAGUUA | | AGCAGCUC | |
| U232 | 1759 | CDS | GCUGAGCUGCUCCAG | 234 | UAGAAACUGGAGCAG | 613 |
| | | | UUUCUA | | CUCAGCAG | |
| U233 | 1800 | CDS | GCGAGCGCAUGGAGG | 235 | UUUGGGCCUCCAUGC | 614 |
| | | | CCCAAA | | GCUCGCCC | |
| U234 | 1823 | CDS | GGCAAGCUGGUCUGC | 236 | UGCCCGGCAGACCAG | 615 |
| | | | CGGGCA | | CUUGCCCC | |
| U235 | 1829 | CDS | CUGGUCUGCCGGGCC | 237 | UUUGUGGGCCCGGCA | 616 |
| | | | CACAAA | | GACCAGCU | |
| U236 | 1831 | CDS | GGUCUGCCGGGCCCA | 238 | UCGUUGUGGGCCCGG | 617 |
| | | | CAACGA | | CAGACCAG | |
| U237 | 1832 | CDS | GUCUGCCGGGCCCAC | 239 | AGCGUUGUGGGCCCG | 618 |
| | | | AACGCU | | GCAGACCA | |
| U238 | 1832 | CDS | GUCUGCCGGGCCCAC | 240 | UGCGUUGUGGGCCCG | 619 |
| | | | AACGCA | | GCAGACCA | |
| U239 | 1833 | CDS | UCUGCCGGGCCCACA | 241 | AAGCGUUGUGGGCCC | 620 |
| | | | ACGCUU | | GGCAGACC | |
| U240 | 1833 | CDS | UCUGCCGGGCCCACA | 242 | UAGCGUUGUGGGCCC | 621 |
| | | | ACGCUA | | GGCAGACC | |
| U241 | 1835 | CDS | UGCCGGGCCCACAAC | 243 | AAAAGCGUUGUGGGC | 622 |
| | | | GCUUUU | | CCGGCAGA | |
| U242 | 1835 | CDS | UGCCGGGCCCACAAC | 244 | UAAAGCGUUGUGGGC | 623 |
| | | | GCUUUA | | CCGGCAGA | |
| U243 | 1836 | CDS | GCCGGGCCCACAACG | 245 | UAAAAGCGUUGUGGG | 624 |
| | | | CUUUUA | | CCCGGCAG | |
| U244 | 1860 | CDS | GUGAGGGUGUCUACG | 246 | UAAUGGCGUAGACAC | 625 |
| | | | CCAUUA | | CCUCACCC | |
| U245 | 1861 | CDS | UGAGGGUGUCUACGC | 247 | UCAAUGGCGUAGACA | 626 |
| | | | CAUUGC | | CCCUCACC | |
| U246 | 1862 | CDS | GAGGGUGUCUACGCC | 248 | UGCAAUGGCGUAGAC | 627 |
| | | | AUUGCA | | ACCCUCAC | |
| U247 | 1863 | CDS | AGGGUGUCUACGCCA | 249 | UGGCAAUGGCGUAGA | 628 |
| | | | UUGCCA | | CACCCUCA | |
| U248 | 1867 | CDS | UGUCUACGCCAUUGC | 250 | UACCUGGCAAUGGCG | 629 |
| | | | CAGGUG | | UAGACACC | |
| U249 | 1914 | CDS | GCGUCCACACAGCUC | 251 | UUGGUGGAGCUGUGU | 630 |
| | | | CACCAA | | GGACGCUG | |
| U250 | 1938 | CDS | AGGCCAGCAUGGGGA | 252 | UACGGGUCCCCAUGC | 631 |
| | | | CCCGUG | | UGGCCUCA | |
| U251 | 1943 | CDS | AGCAUGGGGACCCGU | 253 | UUGGACACGGGUCCC | 632 |
| | | | GUCCAC | | CAUGCUGG | |
| U252 | 1945 | CDS | CAUGGGGACCCGUGU | 254 | UAGUGGACACGGGUC | 633 |
| | | | CCACUA | | CCCAUGCU | |
| U253 | 1946 | CDS | AUGGGGACCCGUGUC | 255 | UCAGUGGACACGGGU | 634 |
| | | | CACUGC | | CCCCAUGC | |
| U254 | 1977 | CDS | GCCACGUCCUCACAG | 256 | UGCAGCCUGUGAGGA | 635 |
| | | | GCUGCA | | CGUGGCCC | |
| U255 | 2006 | CDS | UGGGAGGUGGAGGAC | 257 | UCCAAGGUCCUCCAC | 636 |
| | | | CUUGGC | | CUCCCAGU | |
| U256 | 2017 | CDS | GGACCUUGGCACCCA | 258 | UGCUUGUGGGUGCCA | 637 |
| | | | CAAGCA | | AGGUCCUC | |
| U257 | 2018 | CDS | GACCUUGGCACCCAC | 259 | UGGCUUGUGGGUGCC | 638 |
| | | | AAGCCA | | AAGGUCCU | |
| U258 | 2020 | CDS | CCUUGGCACCCACAA | 260 | UGCGGCUUGUGGGUG | 639 |
| | | | GCCGCA | | CCAAGGUC | |
| U259 | 2022 | CDS | UUGGCACCCACAAGC | 261 | UAGGCGGCUUGUGGG | 640 |
| | | | CGCCUG | | UGCCAAGG | |
| U260 | 2025 | CDS | GCACCCACAAGCCGC | 262 | UCACAGGCGGCUUGU | 641 |
| | | | CUGUGA | | GGGUGCCA | |
| U261 | 2027 | CDS | ACCCACAAGCCGCCU | 263 | UAGCACAGGCGGCUU | 642 |
| | | | GUGCUG | | GUGGGUGC | |
| U262 | 2038 | CDS | GCCUGUGCUGAGGCC | 264 | UCUCGUGGCCUCAGC | 643 |
| | | | ACGAGA | | ACAGGCGG | |
| U263 | 2039 | CDS | CCUGUGCUGAGGCCA | 265 | ACCUCGUGGCCUCAG | 644 |
| | | | CGAGGU | | CACAGGCG | |
| U264 | 2039 | CDS | CCUGUGCUGAGGCCA | 266 | UCCUCGUGGCCUCAG | 645 |
| | | | CGAGGA | | CACAGGCG | |
| U265 | 2040 | CDS | CUGUGCUGAGGCCAC | 267 | UACCUCGUGGCCUCA | 646 |
| | | | GAGGUA | | GCACAGGC | |
| U266 | 2044 | CDS | GCUGAGGCCACGAGG | 268 | UGCUGACCUCGUGGC | 647 |
| | | | UCAGCA | | CUCAGCAC | |
| U267 | 2045 | CDS | CUGAGGCCACGAGGU | 269 | UGGCUGACCUCGUGG | 648 |
| | | | CAGCCA | | CCUCAGCA | |
| U268 | 2048 | CDS | AGGCCACGAGGUCAG | 270 | UUUGGGCUGACCUCG | 649 |
| | | | CCCAAC | | UGGCCUCA | |
| U269 | 2053 | CDS | ACGAGGUCAGCCCAA | 271 | UACUGGUUGGGCUGA | 650 |
| | | | CCAGUG | | CCUCGUGG | |
| U270 | 2054 | CDS | CGAGGUCAGCCCAAC | 272 | UCACUGGUUGGGCUG | 651 |
| | | | CAGUGA | | ACCUCGUG | |
| U271 | 2086 | CDS | GGAGGCCAGCAUCCA | 273 | UAAGCGUGGAUGCUG | 652 |
| | | | CGCUUA | | GCCUCCCU | |
| U272 | 2120 | CDS | CCAGGUCUGGAAUGC | 274 | UACUUUGCAUUCCAG | 653 |
| | | | AAAGUA | | ACCUGGGG | |
| U273 | 2135 | CDS | AAAGUCAAGGAGCAU | 275 | UAUUCCAUGCUCCUU | 654 |
| | | | GGAAUC | | GACUUUGC | |
| U274 | 2136 | CDS | AAGUCAAGGAGCAUG | 276 | UGAUUCCAUGCUCCU | 655 |
| | | | GAAUCC | | UGACUUUG | |
| U275 | 2140 | CDS | CAAGGAGCAUGGAAU | 277 | UCCGGGAUUCCAUGC | 656 |
| | | | CCCGGA | | UCCUUGAC | |
| U276 | 2248 | CDS | GGCCUACGCCGUAGA | 278 | UUGUUGUCUACGGCG | 657 |
| | | | CAACAA | | UAGGCCCC | |
| U277 | 2249 | CDS | GCCUACGCCGUAGAC | 279 | UGUGUUGUCUACGGC | 658 |
| | | | AACACA | | GUAGGCCC | |
| U278 | 2250 | CDS | CCUACGCCGUAGACA | 280 | ACGUGUUGUCUACGG | 659 |
| | | | ACACGU | | CGUAGGCC | |
| U279 | 2250 | CDS | CCUACGCCGUAGACA | 281 | UCGUGUUGUCUACGG | 660 |
| | | | ACACGA | | CGUAGGCC | |
| U280 | 2251 | CDS | CUACGCCGUAGACAA | 282 | UACGUGUUGUCUACG | 661 |
| | | | CACGUA | | GCGUAGGC | |
| U281 | 2253 | CDS | ACGCCGUAGACAACA | 283 | UACACGUGUUGUCUA | 662 |
| | | | CGUGUG | | CGGCGUAG | |
| U282 | 2254 | CDS | CGCCGUAGACAACAC | 284 | ACACACGUGUUGUCU | 663 |
| | | | GUGUGU | | ACGGCGUA | |
| U283 | 2254 | CDS | CGCCGUAGACAACAC | 285 | UCACACGUGUUGUCU | 664 |
| | | | GUGUGA | | ACGGCGUA | |
| U284 | 2255 | CDS | GCCGUAGACAACACG | 286 | UACACACGUGUUGUC | 665 |
| | | | UGUGUA | | UACGGCGU | |
| U285 | 2274 | CDS | UAGUCAGGAGCCGGG | 287 | UGACGUCCCGGCUCC | 666 |
| | | | ACGUCA | | UGACUACA | |
| U286 | 2277 | CDS | UCAGGAGCCGGGACG | 288 | UGCUGACGUCCCGGC | 667 |
| | | | UCAGCA | | UCCUGACU | |
| U287 | 2293 | CDS | CAGCACUACAGGCAG | 289 | UUGGUGCUGCCUGUA | 668 |
| | | | CACCAA | | GUGCUGAC | |
| U288 | 2296 | CDS | CACUACAGGCAGCAC | 290 | UCGCUGGUGCUGCCU | 669 |
| | | | CAGCGA | | GUAGUGCU | |
| U289 | 2322 | CDS | CCGUGACAGCCGUUG | 291 | AGAUGGCAACGGCUG | 670 |
| | | | CCAUCU | | UCACGGCC | |
| U290 | 2322 | CDS | CCGUGACAGCCGUUG | 292 | UGAUGGCAACGGCUG | 671 |
| | | | CCAUCA | | UCACGGCC | |
| U291 | 2326 | CDS | GACAGCCGUUGCCAU | 293 | UAGCAGAUGGCAACG | 672 |
| | | | CUGCUA | | GCUGUCAC | |
| U292 | 2330 | CDS | GCCGUUGCCAUCUGC | 294 | UCGGCAGCAGAUGGC | 673 |
| | | | UGCCGA | | AACGGCUG | |
| U293 | 2428 | 3′ | GGCUGGGGCUGAGCU | 295 | UUUUAAAGCUCAGCC | 674 |
| | | UTR | UUAAAA | | CCAGCCCU | |
| U294 | 2429 | 3′ | GCUGGGGCUGAGCUU | 296 | AUUUUAAAGCUCAGC | 675 |
| | | UTR | UAAAAU | | CCCAGCCC | |
| U295 | 2429 | 3′ | GCUGGGGCUGAGCUU | 297 | UUUUUAAAGCUCAGC | 676 |
| | | UTR | UAAAAA | | CCCAGCCC | |
| U296 | 2430 | 3′ | CUGGGGCUGAGCUUU | 298 | UAUUUUAAAGCUCAG | 677 |
| | | UTR | AAAAUA | | CCCCAGCC | |
| U297 | 2431 | 3′ | UGGGGCUGAGCUUUA | 299 | UCAUUUUAAAGCUCA | 678 |
| | | UTR | AAAUGG | | GCCCCAGC | |
| U298 | 2432 | 3′ | GGGGCUGAGCUUUAA | 300 | ACCAUUUUAAAGCUC | 679 |
| | | UTR | AAUGGU | | AGCCCCAG | |
| U299 | 2432 | 3′ | GGGGCUGAGCUUUAA | 301 | UCCAUUUUAAAGCUC | 680 |
| | | UTR | AAUGGA | | AGCCCCAG | |
| U300 | 2435 | 3′ | GCUGAGCUUUAAAAU | 302 | UGAACCAUUUUAAAG | 681 |
| | | UTR | GGUUCA | | CUCAGCCC | |
| U301 | 2618 | 3′ | UCCCUCACUGUGGGG | 303 | UAAAUGCCCCACAGU | 682 |
| | | UTR | CAUUUC | | GAGGGAGG | |
| U302 | 2619 | 3′ | CCCUCACUGUGGGGC | 304 | UGAAAUGCCCCACAG | 683 |
| | | UTR | AUUUCA | | UGAGGGAG | |
| U303 | 2621 | 3′ | CUCACUGUGGGGCAU | 305 | UGUGAAAUGCCCCAC | 684 |
| | | UTR | UUCACA | | AGUGAGGG | |
| U304 | 2624 | 3′ | ACUGUGGGGCAUUUC | 306 | AAUGGUGAAAUGCCC | 685 |
| | | UTR | ACCAUU | | CACAGUGA | |
| U305 | 2624 | 3′ | ACUGUGGGGCAUUUC | 307 | UAUGGUGAAAUGCCC | 686 |
| | | UTR | ACCAUA | | CACAGUGA | |
| U306 | 2625 | 3′ | CUGUGGGGCAUUUCA | 308 | UAAUGGUGAAAUGCC | 687 |
| | | UTR | CCAUUA | | CCACAGUG | |
| U307 | 2643 | 3′ | UUCAAACAGGUCGAG | 309 | UCACAGCUCGACCUG | 688 |
| | | UTR | CUGUGC | | UUUGAAUG | |
| U308 | 2763 | 3′ | ACCAAGGAGGCAGGA | 310 | UAAGAAUCCUGCCUC | 689 |
| | | UTR | UUCUUC | | CUUGGUGG | |
| U309 | 2770 | 3′ | AGGCAGGAUUCUUCC | 311 | UCCAUGGGAAGAAUC | 690 |
| | | UTR | CAUGGA | | CUGCCUCC | |
| U310 | 2837 | 3′ | GUGAGUGUGAAAGGU | 312 | AUCAGCACCUUUCAC | 691 |
| | | UTR | GCUGAU | | ACUCACCC | |
| U311 | 2849 | 3′ | GGUGCUGAUGGCCCU | 313 | UAGAUGAGGGCCAUC | 692 |
| | | UTR | CAUCUA | | AGCACCUU | |
| U312 | 2853 | 3′ | CUGAUGGCCCUCAUC | 314 | UCUGGAGAUGAGGGC | 693 |
| | | UTR | UCCAGA | | CAUCAGCA | |
| U313 | 2907 | 3′ | UAAUGGAGGCUUAGC | 315 | UAGAAAGCUAAGCCU | 694 |
| | | UTR | UUUCUG | | CCAUUAAU | |
| U314 | 2916 | 3′ | CUUAGCUUUCUGGAU | 316 | UAUGCCAUCCAGAAA | 695 |
| | | UTR | GGCAUA | | GCUAAGCC | |
| U315 | 2917 | 3′ | UUAGCUUUCUGGAUG | 317 | AGAUGCCAUCCAGAA | 696 |
| | | UTR | GCAUCU | | AGCUAAGC | |
| U316 | 2917 | 3′ | UUAGCUUUCUGGAUG | 318 | UGAUGCCAUCCAGAA | 697 |
| | | UTR | GCAUCA | | AGCUAAGC | |
| U317 | 2918 | 3′ | UAGCUUUCUGGAUGG | 319 | UAGAUGCCAUCCAGA | 698 |
| | | UTR | CAUCUA | | AAGCUAAG | |
| U318 | 2925 | 3′ | CUGGAUGGCAUCUAG | 320 | UUCUGGCUAGAUGCC | 699 |
| | | UTR | CCAGAA | | AUCCAGAA | |
| U319 | 2930 | 3′ | UGGCAUCUAGCCAGA | 321 | UCAGCCUCUGGCUAG | 700 |
| | | UTR | GGCUGG | | AUGCCAUC | |
| U320 | 3035 | 3′ | AACACCCAAAGGUGG | 322 | UGCAGGCCACCUUUG | 701 |
| | | UTR | CCUGCG | | GGUGUUGC | |
| U321 | 3104 | 3′ | CUGUCUCAGCCAACC | 323 | UGAGCGGGUUGGCUG | 702 |
| | | UTR | CGCUCA | | AGACAGUG | |
| U322 | 3105 | 3′ | UGUCUCAGCCAACCC | 324 | UGGAGCGGGUUGGCU | 703 |
| | | UTR | GCUCCA | | GAGACAGU | |
| U323 | 3109 | 3′ | UCAGCCAACCCGCUC | 325 | UUAGUGGAGCGGGUU | 704 |
| | | UTR | CACUAC | | GGCUGAGA | |
| U324 | 3111 | 3′ | AGCCAACCCGCUCCA | 326 | UGGUAGUGGAGCGGG | 705 |
| | | UTR | CUACCC | | UUGGCUGA | |
| U325 | 3190 | 3′ | GCGUGCCUGCCAAGC | 327 | UUGUGAGCUUGGCAG | 706 |
| | | UTR | UCACAA | | GCACGCCC | |
| U326 | 3248 | 3′ | CUGAAGCCAAGCCUC | 328 | UAAGAAGAGGCUUGG | 707 |
| | | UTR | UUCUUA | | CUUCAGAG | |
| U327 | 3251 | 3′ | AAGCCAAGCCUCUUC | 329 | AAGUAAGAAGAGGCU | 708 |
| | | UTR | UUACUU | | UGGCUUCA | |
| U328 | 3251 | 3′ | AAGCCAAGCCUCUUC | 330 | UAGUAAGAAGAGGCU | 709 |
| | | UTR | UUACUA | | UGGCUUCA | |
| U329 | 3252 | 3′ | AGCCAAGCCUCUUCU | 331 | UAAGUAAGAAGAGGC | 710 |
| | | UTR | UACUUC | | UUGGCUUC | |
| U330 | 3314 | 3′ | GGGAAGGGGAACACA | 332 | UUGGUCUGUGUUCCC | 711 |
| | | UTR | GACCAA | | CUUCCCAG | |
| U331 | 3330 | 3′ | ACCAGGAAGCUCGGU | 333 | UCACUCACCGAGCUU | 712 |
| | | UTR | GAGUGA | | CCUGGUCU | |
| U332 | 3333 | 3′ | AGGAAGCUCGGUGAG | 334 | UCAUCACUCACCGAG | 713 |
| | | UTR | UGAUGG | | CUUCCUGG | |
| U333 | 3415 | 3′ | UGGCGGAGAUGCUUC | 335 | UCCUUAGAAGCAUCU | 714 |
| | | UTR | UAAGGC | | CCGCCAGG | |
| U334 | 3455 | 3′ | AACAACUGUCCCUCC | 336 | UCUCAAGGAGGGACA | 715 |
| | | UTR | UUGAGC | | GUUGUUGG | |
| U335 | 3458 | 3′ | AACUGUCCCUCCUUG | 337 | UGUGCUCAAGGAGGG | 716 |
| | | UTR | AGCACC | | ACAGUUGU | |
| U336 | 3475 | 3′ | CACCAGCCCCACCCA | 338 | UUUGCUUGGGUGGGG | 717 |
| | | UTR | AGCAAA | | CUGGUGCU | |
| U337 | 3480 | 3′ | GCCCCACCCAAGCAA | 339 | UUCUGCUUGCUUGGG | 718 |
| | | UTR | GCAGAA | | UGGGGCUG | |
| U338 | 3481 | 3′ | CCCCACCCAAGCAAG | 340 | UGUCUGCUUGCUUGG | 719 |
| | | UTR | CAGACA | | GUGGGGCU | |
| U339 | 3485 | 3′ | ACCCAAGCAAGCAGA | 341 | UAAAUGUCUGCUUGC | 720 |
| | | UTR | CAUUUA | | UUGGGUGG | |
| U340 | 3486 | 3′ | CCCAAGCAAGCAGAC | 342 | AUAAAUGUCUGCUUG | 721 |
| | | UTR | AUUUAU | | CUUGGGUG | |
| U341 | 3486 | 3′ | CCCAAGCAAGCAGAC | 343 | UUAAAUGUCUGCUUG | 722 |
| | | UTR | AUUUAA | | CUUGGGUG | |
| U342 | 3488 | 3′ | CAAGCAAGCAGACAU | 344 | AGAUAAAUGUCUGCU | 723 |
| | | UTR | UUAUCU | | UGCUUGGG | |
| U343 | 3492 | 3′ | CAAGCAGACAUUUAU | 345 | UAAAAGAUAAAUGUC | 724 |
| | | UTR | CUUUUA | | UGCUUGCU | |
| U344 | 3498 | 3′ | GACAUUUAUCUUUUG | 346 | UAGACCCAAAAGAUA | 725 |
| | | UTR | GGUCUA | | AAUGUCUG | |
| U345 | 3501 | 3′ | AUUUAUCUUUUGGGU | 347 | UGACAGACCCAAAAG | 726 |
| | | UTR | CUGUCC | | AUAAAUGU | |
| U346 | 3502 | 3′ | UUUAUCUUUUGGGUC | 348 | AGGACAGACCCAAAA | 727 |
| | | UTR | UGUCCU | | GAUAAAUG | |
| U347 | 3502 | 3′ | UUUAUCUUUUGGGUC | 349 | UGGACAGACCCAAAA | 728 |
| | | UTR | UGUCCA | | GAUAAAUG | |
| U348 | 3505 | 3′ | AUCUUUUGGGUCUGU | 350 | UAGAGGACAGACCCA | 729 |
| | | UTR | CCUCUC | | AAAGAUAA | |
| U349 | 3543 | 3′ | CAACUUUUCUAGACC | 351 | AAAACAGGUCUAGAA | 730 |
| | | UTR | UGUUUU | | AAGUUGGC | |
| U350 | 3543 | 3′ | CAACUUUUCUAGACC | 352 | UAAACAGGUCUAGAA | 731 |
| | | UTR | UGUUUA | | AAGUUGGC | |
| U351 | 3544 | 3′ | AACUUUUCUAGACCU | 353 | UAAAACAGGUCUAGA | 732 |
| | | UTR | GUUUUG | | AAAGUUGG | |
| U352 | 3547 | 3′ | UUUUCUAGACCUGUU | 354 | AAGCAAAACAGGUCU | 733 |
| | | UTR | UUGCUU | | AGAAAAGU | |
| U353 | 3551 | 3′ | CUAGACCUGUUUUGC | 355 | ACAAAAGCAAAACAG | 734 |
| | | UTR | UUUUGU | | GUCUAGAA | |
| U354 | 3551 | 3′ | CUAGACCUGUUUUGC | 356 | UCAAAAGCAAAACAG | 735 |
| | | UTR | UUUUGA | | GUCUAGAA | |
| U355 | 3553 | 3′ | AGACCUGUUUUGCUU | 357 | UUACAAAAGCAAAAC | 736 |
| | | UTR | UUGUAA | | AGGUCUAG | |
| U356 | 3558 | 3′ | UGUUUUGCUUUUGUA | 358 | UCAAGUUACAAAAGC | 737 |
| | | UTR | ACUUGA | | AAAACAGG | |
| U357 | 3559 | 3′ | GUUUUGCUUUUGUAA | 359 | UUCAAGUUACAAAAG | 738 |
| | | UTR | CUUGAA | | CAAAACAG | |
| U358 | 3561 | 3′ | UUUGCUUUUGUAACU | 360 | UCUUCAAGUUACAAA | 739 |
| | | UTR | UGAAGA | | AGCAAAAC | |
| U359 | 3562 | 3′ | UUGCUUUUGUAACUU | 361 | AUCUUCAAGUUACAA | 740 |
| | | UTR | GAAGAU | | AAGCAAAA | |
| U360 | 3562 | 3′ | UUGCUUUUGUAACUU | 362 | UUCUUCAAGUUACAA | 741 |
| | | UTR | GAAGAA | | AAGCAAAA | |
| U361 | 3563 | 3′ | UGCUUUUGUAACUUG | 363 | UAUCUUCAAGUUACA | 742 |
| | | UTR | AAGAUA | | AAAGCAAA | |
| U362 | 3564 | 3′ | GCUUUUGUAACUUGA | 364 | AUAUCUUCAAGUUAC | 743 |
| | | UTR | AGAUAU | | AAAAGCAA | |
| U363 | 3564 | 3′ | GCUUUUGUAACUUGA | 365 | UUAUCUUCAAGUUAC | 744 |
| | | UTR | AGAUAA | | AAAAGCAA | |
| U364 | 3567 | 3′ | UUUGUAACUUGAAGA | 366 | UAAAUAUCUUCAAGU | 745 |
| | | UTR | UAUUUA | | UACAAAAG | |
| U365 | 3568 | 3′ | UUGUAACUUGAAGAU | 367 | AUAAAUAUCUUCAAG | 746 |
| | | UTR | AUUUAU | | UUACAAAA | |
| U366 | 3587 | 3′ | AUUCUGGGUUUUGUA | 368 | AAAUGCUACAAAACC | 747 |
| | | UTR | GCAUUU | | CAGAAUAA | |
| U367 | 3587 | 3′ | AUUCUGGGUUUUGUA | 369 | UAAUGCUACAAAACC | 748 |
| | | UTR | GCAUUA | | CAGAAUAA | |
| U368 | 3590 | 3′ | CUGGGUUUUGUAGCA | 370 | UAAAAAUGCUACAAA | 749 |
| | | UTR | UUUUUA | | ACCCAGAA | |
| U369 | 3595 | 3′ | UUUUGUAGCAUUUUU | 371 | AUUAAUAAAAAUGCU | 750 |
| | | UTR | AUUAAU | | ACAAAACC | |
| U370 | 3597 | 3′ | UUGUAGCAUUUUUAU | 372 | AUAUUAAUAAAAAUG | 751 |
| | | UTR | UAAUAU | | CUACAAAA | |
| U371 | 3600 | 3′ | UAGCAUUUUUAUUAA | 373 | ACCAUAUUAAUAAAA | 752 |
| | | UTR | UAUGGU | | AUGCUACA | |
| U372 | 3604 | 3′ | AUUUUUAUUAAUAUG | 374 | AGUCACCAUAUUAAU | 753 |
| | | UTR | GUGACU | | AAAAAUGC | |
| U373 | 3606 | 3′ | UUUUAUUAAUAUGGU | 375 | AAAGUCACCAUAUUA | 754 |
| | | UTR | GACUUU | | AUAAAAAU | |
| U374 | 3607 | 3′ | UUUAUUAAUAUGGUG | 376 | AAAAGUCACCAUAUU | 755 |
| | | UTR | ACUUUU | | AAUAAAAA | |
| U375 | 3608 | 3′ | UUAUUAAUAUGGUGA | 377 | AAAAAGUCACCAUAU | 756 |
| | | UTR | CUUUUU | | UAAUAAAA | |
| U376 | 3609 | 3′ | UAUUAAUAUGGUGAC | 378 | UAAAAAGUCACCAUA | 757 |
| | | UTR | UUUUUA | | UUAAUAAA | |
| U377 | 3610 | 3′ | AUUAAUAUGGUGACU | 379 | UUAAAAAGUCACCAU | 758 |
| | | UTR | UUUUAA | | AUUAAUAA | |
| U378 | 3612 | 3′ | UAAUAUGGUGACUUU | 380 | UUUUAAAAAGUCACC | 759 |
| | | UTR | UUAAAA | | AUAUUAAU | |
| U379 | 3613 | 3′ | AAUAUGGUGACUUUU | 381 | AUUUUAAAAAGUCAC | 760 |
| | | UTR | UAAAAU | | CAUAUUAA | |

*site of mRNA target is located in human PCSK9 mRNA sequence in SEQ ID NO: 2.

[0345] In Table 1, each code (letter, e.g., A, G, C, and U) represents a single ribonucleotide in the dsRNA. In some embodiments, the sequence list may be inclusive of any possible modifications, for example, a modification in a nucleobase, a ribose sugar ring, and/or a phosphate group (i.e., phosphodiester internucleoside linkage). In some embodiments, the last nucleotide from the 5′ end (or the first nucleotide from 3′ end) in each strand (sense strand and antisense strand) may have not include a phosphate group as being hydrolyzed or processed, e.g., during the synthesis of the oligonucleotides, but may contain 3′-terminal —OH group. In some embodiments, a phosphate group in the last nucleotide from the 5′ end (or the first nucleotide from 3′ end) in the sense strand may be added as a functional group for conjugation with a ligand.

[0346] In some embodiments, the dsRNA includes a sense strand having 10 contiguous nucleotides differing by no more than 3 nucleotides from the nucleotide sequence selected from SEQ ID NOs: 3 to 381. In some embodiments, the dsRNA includes an antisense strand having 10 contiguous nucleotides differing by no more than 3 nucleotides from the nucleotide sequence of SEQ ID NOs: 382 to 760. In some embodiments, the dsRNA includes a sense strand having 11 contiguous nucleotides differing by no more than 3 nucleotides from the nucleotide sequence selected from SEQ ID NOs: 3 to 381. In some embodiments, the dsRNA includes an antisense strand having 11 contiguous nucleotides differing by no more than 3 nucleotides from the nucleotide sequence selected from SEQ ID NOs: 382 to 760. In some embodiments, the dsRNA includes a sense strand having 12 contiguous nucleotides differing by no more than 3 nucleotides from the nucleotide sequence selected from SEQ ID NOs: 3 to 381. In some embodiments, the dsRNA includes an antisense strand having 12 contiguous nucleotides differing by no more than 3 nucleotides from the nucleotide sequence selected from SEQ ID NOs: 382 to 760. In some embodiments, the dsRNA includes a sense strand having 13 contiguous nucleotides differing by no more than 3 nucleotides from the nucleotide sequence selected from SEQ ID NOs: 3 to 381. In some embodiments, the dsRNA includes an antisense strand having 13 contiguous nucleotides differing by no more than 3 nucleotides from the nucleotide sequence selected from SEQ ID NOs: 382 to 760. In some embodiments, the dsRNA includes a sense strand having 14 contiguous nucleotides differing by no more than 3 nucleotides from the nucleotide sequence selected from SEQ ID NOs: 3 to 381. In some embodiments, the dsRNA includes an antisense strand having 14 contiguous nucleotides differing by no more than 3 nucleotides from the nucleotide sequence selected from SEQ ID NOs: 382 to 760. In some embodiments, the dsRNA includes a sense strand having 15 contiguous nucleotides differing by no more than 3 nucleotides from the nucleotide sequence selected from SEQ ID NOs: 3 to 381. In some embodiments, the dsRNA includes an antisense strand having 15 contiguous nucleotides differing by no more than 3 nucleotides from the nucleotide sequence selected from SEQ ID NOs: 382 to 760. In some embodiments, the dsRNA includes a sense strand having 16 contiguous nucleotides differing by no more than 3 nucleotides from the nucleotide sequence selected from SEQ ID NOs: 3 to 381. In some embodiments, the dsRNA includes an antisense strand having 16 contiguous nucleotides differing by no more than 3 nucleotides from the nucleotide sequence selected from SEQ ID NOs: 382 to 760. In some embodiments, the dsRNA includes a sense strand having 17 contiguous nucleotides differing by no more than 3 nucleotides from the nucleotide sequence selected from SEQ ID NOs: 3 to 381. In some embodiments, the dsRNA includes an antisense strand having 17 contiguous nucleotides differing by no more than 3 nucleotides from the nucleotide sequence selected from SEQ ID NOs: 382 to 760. In some embodiments, the dsRNA includes a sense strand having 18 contiguous nucleotides differing by no more than 3 nucleotides from the nucleotide sequence selected from SEQ ID NOs: 3 to 381. In some embodiments, the dsRNA includes an antisense strand having 18 contiguous nucleotides differing by no more than 3 nucleotides from the nucleotide sequence selected from SEQ ID NOs: 382 to 760. In some embodiments, the dsRNA includes a sense strand having 19 contiguous nucleotides differing by no more than 3 nucleotides from the nucleotide sequence selected from SEQ ID NOs: 3 to 381. In some embodiments, the dsRNA includes an antisense strand having 19 contiguous nucleotides differing by no more than 3 nucleotides from the nucleotide sequence selected from SEQ ID NOs: 382 to 760. In some embodiments, the dsRNA includes a sense strand having 20 contiguous nucleotides differing by no more than 3 nucleotides from the nucleotide sequence selected from SEQ ID NOs: 3 to 381. In some embodiments, the dsRNA includes an antisense strand having 20 contiguous nucleotides differing by no more than 3 nucleotides from the nucleotide sequence selected from SEQ ID NOs: 382 to 760. In some embodiments, the dsRNA includes a sense strand having 21 contiguous nucleotides differing by no more than 3 nucleotides from the nucleotide sequence selected from SEQ ID NOs: 3 to 381. In some embodiments, the dsRNA includes an antisense strand having 21 contiguous nucleotides differing by no more than 3 nucleotides from the nucleotide sequence selected from SEQ ID NOs: 382 to 760.

[0347] In some embodiments, the dsRNA includes a sense strand having 10 contiguous nucleotides differing by no more than 2 nucleotides from the nucleotide sequence selected from SEQ ID NOs: 3 to 381. In some embodiments, the dsRNA includes an antisense strand having 10 contiguous nucleotides differing by no more than 2 nucleotides from the nucleotide sequence selected from SEQ ID NOs: 382 to 760. In some embodiments, the dsRNA includes a sense strand having 11 contiguous nucleotides differing by no more than 2 nucleotides from the nucleotide sequence selected from SEQ ID NOs: 3 to 381. In some embodiments, the dsRNA includes an antisense strand having 11 contiguous nucleotides differing by no more than 2 nucleotides from the nucleotide sequence selected from SEQ ID NOs: 382 to 760. In some embodiments, the dsRNA includes a sense strand having 12 contiguous nucleotides differing by no more than 2 nucleotides from the nucleotide sequence selected from SEQ ID NOs: 3 to 381. In some embodiments, the dsRNA includes an antisense strand having 12 contiguous nucleotides differing by no more than 2 nucleotides from the nucleotide sequence selected from SEQ ID NOs: 382 to 760. In some embodiments, the dsRNA includes a sense strand having 13 contiguous nucleotides differing by no more than 2 nucleotides from the nucleotide sequence selected from SEQ ID NOs: 3 to 381. In some embodiments, the dsRNA includes an antisense strand having 13 contiguous nucleotides differing by no more than 2 nucleotides from the nucleotide sequence selected from SEQ ID NOs: 382 to 760. In some embodiments, the dsRNA includes a sense strand having 14 contiguous nucleotides differing by no more than 2 nucleotides from the nucleotide sequence selected from SEQ ID NOs: 3 to 381. In some embodiments, the dsRNA includes an antisense strand having 14 contiguous nucleotides differing by no more than 2 nucleotides from the nucleotide sequence selected from SEQ ID NOs: 382 to 760. In some embodiments, the dsRNA includes a sense strand having 15 contiguous nucleotides differing by no more than 2 nucleotides from the nucleotide sequence selected from SEQ ID NOs: 3 to 381. In some embodiments, the dsRNA includes an antisense strand having 15 contiguous nucleotides differing by no more than 2 nucleotides from the nucleotide sequence selected from SEQ ID NOs: 382 to 760. In some embodiments, the dsRNA includes a sense strand having 16 contiguous nucleotides differing by no more than 2 nucleotides from the nucleotide sequence selected from SEQ ID NOs: 3 to 381. In some embodiments, the dsRNA includes an antisense strand having 16 contiguous nucleotides differing by no more than 2 nucleotides from the nucleotide sequence selected from SEQ ID NOs: 382 to 760. In some embodiments, the dsRNA includes a sense strand having 17 contiguous nucleotides differing by no more than 2 nucleotides from the nucleotide sequence selected from SEQ ID NOs: 3 to 381. In some embodiments, the dsRNA includes an antisense strand having 17 contiguous nucleotides differing by no more than 2 nucleotides from the nucleotide sequence selected from SEQ ID NOs: 382 to 760. In some embodiments, the dsRNA includes a sense strand having 18 contiguous nucleotides differing by no more than 2 nucleotides from the nucleotide sequence selected from SEQ ID NOs: 3 to 381. In some embodiments, the dsRNA includes an antisense strand having 18 contiguous nucleotides differing by no more than 2 nucleotides from the nucleotide sequence selected from SEQ ID NOs: 382 to 760. In some embodiments, the dsRNA includes a sense strand having 19 contiguous nucleotides differing by no more than 2 nucleotides from the nucleotide sequence selected from SEQ ID NOs: 3 to 381. In some embodiments, the dsRNA includes an antisense strand having 19 contiguous nucleotides differing by no more than 2 nucleotides from the nucleotide sequence selected from SEQ ID NOs: 382 to 760. In some embodiments, the dsRNA includes a sense strand having 20 contiguous nucleotides differing by no more than 2 nucleotides from the nucleotide sequence selected from SEQ ID NOs: 3 to 381. In some embodiments, the dsRNA includes an antisense strand having 20 contiguous nucleotides differing by no more than 2 nucleotides from the nucleotide sequence selected from SEQ ID NOs: 382 to 760. In some embodiments, the dsRNA includes a sense strand having 21 contiguous nucleotides differing by no more than 2 nucleotides from the nucleotide sequence selected from SEQ ID NOs: 3 to 381. In some embodiments, the dsRNA includes an antisense strand having 21 contiguous nucleotides differing by no more than 2 nucleotides from the nucleotide sequence selected from SEQ ID NOs: 382 to 760.

[0348] In some embodiments, the dsRNA includes a sense strand having 10 contiguous nucleotides differing by no more than 1 nucleotide from the nucleotide sequence selected from SEQ ID NOs: 3 to 381. In some embodiments, the dsRNA includes an antisense strand having 10 contiguous nucleotides differing by no more than 1 nucleotide from the nucleotide sequence selected from SEQ ID NOs: 382 to 760. In some embodiments, the dsRNA includes a sense strand having 11 contiguous nucleotides differing by no more than 1 nucleotide from the nucleotide sequence selected from SEQ ID NOs: 3 to 381. In some embodiments, the dsRNA includes an antisense strand having 11 contiguous nucleotides differing by no more than 1 nucleotide from the nucleotide sequence selected from SEQ ID NOs: 382 to 760. In some embodiments, the dsRNA includes a sense strand having 12 contiguous nucleotides differing by no more than 1 nucleotide from the nucleotide sequence selected from SEQ ID NOs: 3 to 381. In some embodiments, the dsRNA includes an antisense strand having 12 contiguous nucleotides differing by no more than 1 nucleotide from the nucleotide sequence selected from SEQ ID NOs: 382 to 760. In some embodiments, the dsRNA includes a sense strand having 13 contiguous nucleotides differing by no more than 1 nucleotide from the nucleotide sequence selected from SEQ ID NOs: 3 to 381. In some embodiments, the dsRNA includes an antisense strand having 13 contiguous nucleotides differing by no more than 1 nucleotide from the nucleotide sequence selected from SEQ ID NOs: 382 to 760. In some embodiments, the dsRNA includes a sense strand having 14 contiguous nucleotides differing by no more than 1 nucleotide from the nucleotide sequence selected from SEQ ID NOs: 3 to 381. In some embodiments, the dsRNA includes an antisense strand having 14 contiguous nucleotides differing by no more than 1 nucleotide from the nucleotide sequence selected from SEQ ID NOs: 382 to 760. In some embodiments, the dsRNA includes a sense strand having 15 contiguous nucleotides differing by no more than 1 nucleotide from the nucleotide sequence selected from SEQ ID NOs: 3 to 381. In some embodiments, the dsRNA includes an antisense strand having 15 contiguous nucleotides differing by no more than 1 nucleotide from the nucleotide sequence selected from SEQ ID NOs: 382 to 760. In some embodiments, the dsRNA includes a sense strand having 16 contiguous nucleotides differing by no more than 1 nucleotide from the nucleotide sequence selected from SEQ ID NOs: 3 to 381. In some embodiments, the dsRNA includes an antisense strand having 16 contiguous nucleotides differing by no more than 1 nucleotide from the nucleotide sequence selected from SEQ ID NOs: 382 to 760. In some embodiments, the dsRNA includes a sense strand having 17 contiguous nucleotides differing by no more than 1 nucleotide from the nucleotide sequence selected from SEQ ID NOs: 3 to 381. In some embodiments, the dsRNA includes an antisense strand having 17 contiguous nucleotides differing by no more than 1 nucleotide from the nucleotide sequence selected from SEQ ID NOs: 382 to 760. In some embodiments, the dsRNA includes a sense strand having 18 contiguous nucleotides differing by no more than 1 nucleotide from the nucleotide sequence selected from SEQ ID NOs: 3 to 381. In some embodiments, the dsRNA includes an antisense strand having 18 contiguous nucleotides differing by no more than 1 nucleotide from the nucleotide sequence selected from SEQ ID NOs: 382 to 760. In some embodiments, the dsRNA includes a sense strand having 19 contiguous nucleotides differing by no more than 1 nucleotide from the nucleotide sequence selected from SEQ ID NOs: 3 to 381. In some embodiments, the dsRNA includes an antisense strand having 19 contiguous nucleotides differing by no more than 1 nucleotide from the nucleotide sequence selected from SEQ ID NOs: 382 to 760. In some embodiments, the dsRNA includes a sense strand having 20 contiguous nucleotides differing by no more than 1 nucleotide from the nucleotide sequence selected from SEQ ID NOs: 3 to 381. In some embodiments, the dsRNA includes an antisense strand having 20 contiguous nucleotides differing by no more than 1 nucleotide from the nucleotide sequence selected from SEQ ID NOs: 382 to 760. In some embodiments, the dsRNA includes a sense strand having 21 contiguous nucleotides differing by no more than 1 nucleotide from the nucleotide sequence selected from SEQ ID NOs: 3 to 381. In some embodiments, the dsRNA includes an antisense strand having 21 contiguous nucleotides differing by no more than 1 nucleotide from the nucleotide sequence selected from SEQ ID NOs: 382 to 760. In some embodiments, the dsRNA includes an antisense strand having 22 contiguous nucleotides differing by no more than 1 nucleotide from the nucleotide sequence selected from SEQ ID NOs: 382 to 760. In some embodiments, the dsRNA includes an antisense strand having 23 contiguous nucleotides differing by no more than 1 nucleotide from the nucleotide sequence selected from SEQ ID NOs: 382 to 760.

[0349] In some embodiments, the dsRNA includes (i) a sense strand having 15 contiguous nucleotides differing by no more than one, two or three nucleotides from the nucleotide sequence selected from SEQ ID NOs: 3 to 381 and (ii) an antisense strand forming a duplex with the sense strand of (i) and having 15 contiguous nucleotides differing by no more than one, two or three nucleotides from the nucleotide sequence selected from SEQ ID NOs: 382 to 760. In some embodiments, the dsRNA includes (i) a sense strand having 16 contiguous nucleotides differing by no more than one, two or three from the nucleotide sequence selected from SEQ ID NOs: 3 to 381 and (ii) an antisense strand forming a duplex with the sense strand of (i) and having 16 contiguous nucleotides differing by no more than one, two or three nucleotides from the nucleotide sequence selected from SEQ ID NOs: 382 to 760. In some embodiments, the dsRNA includes (i) a sense strand having 17 contiguous nucleotides differing by no more than one, two or three nucleotides from the nucleotide sequence selected from SEQ ID NOs: 3 to 381 and (ii) an antisense strand forming a duplex with the sense strand of (i) and having 17 contiguous nucleotides differing by no more than one, two or three nucleotides from the nucleotide sequence selected from SEQ ID NOs: 382 to 760. In some embodiments, the dsRNA includes (i) a sense strand having 18 contiguous nucleotides differing by no more than one, two or three nucleotides from the nucleotide sequence selected from SEQ ID NOs: 3 to 381 and (ii) an antisense strand forming a duplex with the sense strand of (i) and having 18 contiguous nucleotides differing by no more than one, two or three nucleotides from the nucleotide sequence selected from SEQ ID NOs: 382 to 760. In some embodiments, the dsRNA includes (i) a sense strand having 19 contiguous nucleotides differing by no more than one, two or three nucleotides from the nucleotide sequence selected from SEQ ID NOs: 3 to 381 and (ii) an antisense strand forming a duplex with the sense strand of (i) and having 19 contiguous nucleotides differing by no more than one, two or three nucleotides from the nucleotide sequence selected from SEQ ID NOs: 382 to 760. In some embodiments, the dsRNA includes (i) a sense strand having 20 contiguous nucleotides differing by no more than one, two or three nucleotides from the nucleotide sequence selected from SEQ ID NOs: 3 to 381 and (ii) an antisense strand forming a duplex with the sense strand of (i) and having 20 contiguous nucleotides differing by no more than one, two or three nucleotides from the nucleotide sequence selected from SEQ ID NOs: 382 to 760. In some embodiments, the dsRNA includes (i) a sense strand having 21 contiguous nucleotides differing by no more than one, two or three nucleotides from the nucleotide sequence selected from SEQ ID NOs: 3 to 381 and (ii) an antisense strand forming a duplex with the sense strand of (i) and having 21 contiguous nucleotides differing by no more than one, two or three nucleotides from the nucleotide sequence selected from SEQ ID NOs: 382 to 760.

[0350] In certain aspects, the sequences of the single strands (i.e., sense strand and antisense strand) of the dsRNA can be selected by selecting a target region and a length in the PCSK9 mRNA. In certain aspects, a dsRNA as described herein may target a nucleotide region selected from regions of (i) 600-800; (ii) 800 to 1000; (iii) 1000-1200; (iv) 3100-3300; or (v) 3400-3600 of a human PCSK9 mRNA sequence that has at least about 85% (e.g., about 85%, about 86%, about 87%, about 88%, about 89%, about 90%, about 91%, about 92%, about 93%, about 94%, about 95%, about 96%, about 97%, about 98%, about 99% or 100%) identity to SEQ ID NO: 2 (human PCSK9 isoform, transcript variant 1, mRNA (GenBank: NM_174936.4)). In some embodiments, the target region is selected from regions of (i) 650-750; (ii) 850-950; (iii) 1050-1150; (iv) 3200-3300; (v) 3400-3500; or (vi) 3500-3600 of a human PCSK9 mRNA sequence that has at least about 85% (e.g., about 85%, about 86%, about 87%, about 88%, about 89%, about 90%, about 91%, about 92%, about 93%, about 94%, about 95%, about 96%, about 97%, about 98%, about 99% or 100%) identity to SEQ ID NO: 2 (human PCSK9 isoform, transcript variant 1, mRNA (GenBank: NM_174936.4)).

[0351] In some embodiments, the antisense strand targets a region of (i) 600-800; (ii) 800-1000; (iii) 1000-1200; (iv) 3100-3300; or (v) 3400-3600 nucleotides in a human PCSK9 mRNA sequence that has at least about 85% (e.g., about 85%, about 86%, about 87%, about 88%, about 89%, about 90%, about 91%, about 92%, about 93%, about 94%, about 95%, about 96%, about 97%, about 98%, about 99% or 100%) identity to SEQ ID NO: 2 (human PCSK9 isoform, transcript variant 1, mRNA (GenBank: NM_174936.4)). In some embodiments, the antisense strand targets a region of (i) 650-750; (ii) 850-950; (iii) 1050-1150; (iv) 3200-3300; (v) 3400-3500; or (vi) 3500-3600 nucleotides in a human PCSK9 mRNA sequence that has at least about 85% (e.g., about 85%, about 86%, about 87%, about 88%, about 89%, about 90%, about 91%, about 92%, about 93%, about 94%, about 95%, about 96%, about 97%, about 98%, about 99% or 100%) identity to SEQ ID NO: 2 (human PCSK9 isoform, transcript variant 1, mRNA (GenBank: NM_174936.4)). In some embodiments, the antisense strand targets a region of 3500th to 3600th nucleotides in a human PCSK9 mRNA sequence that has at least about 85% (e.g., about 85%, about 86%, about 87%, about 88%, about 89%, about 90%, about 91%, about 92%, about 93%, about 94%, about 95%, about 96%, about 97%, about 98%, about 99% or 100%) identity to SEQ ID NO: 2 (human PCSK9 isoform, transcript variant 1, mRNA (GenBank: NM_174936.4)).

[0352] Exemplary selected siRNA sequences targeting the regions described herein (e.g., target region of (i) 600-800; (ii) 800 to 1000; (iii) 1000-1200; (iv) 3100-3300; or (v) 3400-3600) are shown in Table 2.

TABLE 2
Selected sequences of PCSK9 siRNA (unmodified nucleotide sequences)

| | Site of | | SEQ | | SEQ |
|---|---|---|---|---|---|
| SiRNA | mRNA | | ID | | ID |
| No. | Target* | Sense strand | NO. | Antisense strand | NO. |
| P1 | 3551 | CUAGACCUGUUUUGCU | 761 | ACAAAAGCAAAACAGGUC | 777 |
| | | UUUGU | | UAGAA | |
| P2 | 3492 | CAAGCAGACAUUUAUC | 762 | UAAAAGAUAAAUGUCUGC | 778 |
| | | UUUUA | | UUGCU | |
| P3 | 3543 | CAACUUUUCUAGACCU | 763 | AAAACAGGUCUAGAAAAG | 779 |
| | | GUUUU | | UUGGC | |
| P4 | 3564 | GCUUUUGUAACUUGAA | 764 | AUAUCUUCAAGUUACAAA | 780 |
| | | GAUAU | | AGCAA | |
| P5 | 713 | UUGAAGUUGCCCCAUG | 765 | UUCGACAUGGGGCAACUU | 781 |
| | | UCGAA | | CAAGG | |
| P6 | 1102 | CCUCAUAGGCCUGGAG | 766 | AUAAACUCCAGGCCUAUG | 782 |
| | | UUUAU | | AGGGU | |
| P7 | 3251 | AAGCCAAGCCUCUUCU | 767 | AAGUAAGAAGAGGCUUGG | 783 |
| | | UACUU | | CUUCA | |
| P8 | 3252 | AGCCAAGCCUCUUCUU | 768 | UAAGUAAGAAGAGGCUUG | 784 |
| | | ACUUA | | GCUUC | |
| P9 | 3547 | UUUUCUAGACCUGUUU | 769 | AAGCAAAACAGGUCUAGA | 785 |
| | | UGCUU | | AAAGU | |
| P10 | 3553 | AGACCUGUUUUGCUUU | 770 | UUACAAAAGCAAAACAGG | 786 |
| | | UGUAA | | UCUAG | |
| P11 | 3568 | UUGUAACUUGAAGAUA | 771 | AUAAAUAUCUUCAAGUUA | 787 |
| | | UUUAU | | CAAAA | |
| P12 | 3559 | GUUUUGCUUUUGUAAC | 772 | UUCAAGUUACAAAAGCAA | 788 |
| | | UUGAA | | | |
| P13 | 432 | UGGUGCUAGCCUUGCG | 773 | UGGAACGCAAGGCUAGCA | 789 |
| | | UUCCA | | CCAGC | |
| P14 | 881 | AGUGACCACCGGGAAA | 774 | UUCGAUUUCCCGGUGGUC | 790 |
| | | UCGAA | | ACUCU | |
| P15 | 2907 | UAAUGGAGGCUUAGCU | 775 | UAGAAAGCUAAGCCUCCA | 791 |
| | | UUCUA | | UUAAU | |
| P16 | 865 | AGACACCAGCAUACAG | 776 | UCACUCUGUAUGCUGGUG | 792 |
| | | AGUGA | | UCUAG | |

*site of mRNA target is located in human PCSK9 mRNA sequence in SEQ ID NO: 2.

[0353] In some embodiments, the dsRNA includes a sense strand having 10 contiguous nucleotides differing by no more than 3 nucleotides from the nucleotide sequence selected from SEQ ID NOs: 761 to 776. In some embodiments, the dsRNA includes an antisense strand having 10 contiguous nucleotides differing by no more than 3 nucleotides from the nucleotide sequence of SEQ ID NOs: 777 to 792. In some embodiments, the dsRNA includes a sense strand having 11 contiguous nucleotides differing by no more than 3 nucleotides from the nucleotide sequence selected from SEQ ID NOs: 761 to 776. In some embodiments, the dsRNA includes an antisense strand having 11 contiguous nucleotides differing by no more than 3 nucleotides from the nucleotide sequence selected from SEQ ID NOs: 777 to 792. In some embodiments, the dsRNA includes a sense strand having 12 contiguous nucleotides differing by no more than 3 nucleotides from the nucleotide sequence selected from SEQ ID NOs: 761 to 776. In some embodiments, the dsRNA includes an antisense strand having 12 contiguous nucleotides differing by no more than 3 nucleotides from the nucleotide sequence selected from SEQ ID NOs: 777 to 792. In some embodiments, the dsRNA includes a sense strand having 13 contiguous nucleotides differing by no more than 3 nucleotides from the nucleotide sequence selected from SEQ ID NOs: 761 to 776. In some embodiments, the dsRNA includes an antisense strand having 13 contiguous nucleotides differing by no more than 3 nucleotides from the nucleotide sequence selected from SEQ ID NOs: 777 to 792. In some embodiments, the dsRNA includes a sense strand having 14 contiguous nucleotides differing by no more than 3 nucleotides from the nucleotide sequence selected from SEQ ID NOs: 761 to 776. In some embodiments, the dsRNA includes an antisense strand having 14 contiguous nucleotides differing by no more than 3 nucleotides from the nucleotide sequence selected from SEQ ID NOs: 777 to 792. In some embodiments, the dsRNA includes a sense strand having 15 contiguous nucleotides differing by no more than 3 nucleotides from the nucleotide sequence selected from SEQ ID NOs: 761 to 776. In some embodiments, the dsRNA includes an antisense strand having 15 contiguous nucleotides differing by no more than 3 nucleotides from the nucleotide sequence selected from SEQ ID NOs: 777 to 792. In some embodiments, the dsRNA includes a sense strand having 16 contiguous nucleotides differing by no more than 3 nucleotides from the nucleotide sequence selected from SEQ ID NOs: 761 to 776. In some embodiments, the dsRNA includes an antisense strand having 16 contiguous nucleotides differing by no more than 3 nucleotides from the nucleotide sequence selected from SEQ ID NOs: 777 to 792. In some embodiments, the dsRNA includes a sense strand having 17 contiguous nucleotides differing by no more than 3 nucleotides from the nucleotide sequence selected from SEQ ID NOs: 761 to 776. In some embodiments, the dsRNA includes an antisense strand having 17 contiguous nucleotides differing by no more than 3 nucleotides from the nucleotide sequence selected from SEQ ID NOs: 777 to 792. In some embodiments, the dsRNA includes a sense strand having 18 contiguous nucleotides differing by no more than 3 nucleotides from the nucleotide sequence selected from SEQ ID NOs: 761 to 776. In some embodiments, the dsRNA includes an antisense strand having 18 contiguous nucleotides differing by no more than 3 nucleotides from the nucleotide sequence selected from SEQ ID NOs: 777 to 792. In some embodiments, the dsRNA includes a sense strand having 19 contiguous nucleotides differing by no more than 3 nucleotides from the nucleotide sequence selected from SEQ ID NOs: 761 to 776. In some embodiments, the dsRNA includes an antisense strand having 19 contiguous nucleotides differing by no more than 3 nucleotides from the nucleotide sequence selected from SEQ ID NOs: 777 to 792. In some embodiments, the dsRNA includes a sense strand having 20 contiguous nucleotides differing by no more than 3 nucleotides from the nucleotide sequence selected from SEQ ID NOs: 761 to 776. In some embodiments, the dsRNA includes an antisense strand having 20 contiguous nucleotides differing by no more than 3 nucleotides from the nucleotide sequence selected from SEQ ID NOs: 777 to 792. In some embodiments, the dsRNA includes a sense strand having 21 contiguous nucleotides differing by no more than 3 nucleotides from the nucleotide sequence selected from SEQ ID NOs: 761 to 776. In some embodiments, the dsRNA includes an antisense strand having 21 contiguous nucleotides differing by no more than 3 nucleotides from the nucleotide sequence selected from SEQ ID NOs: 777 to 792.

[0354] In some embodiments, the dsRNA includes a sense strand having 10 contiguous nucleotides differing by no more than 2 nucleotides from the nucleotide sequence selected from SEQ ID NOs: 761 to 776. In some embodiments, the dsRNA includes an antisense strand having 10 contiguous nucleotides differing by no more than 2 nucleotides from the nucleotide sequence selected from SEQ ID NOs: 777 to 792. In some embodiments, the dsRNA includes a sense strand having 11 contiguous nucleotides differing by no more than 2 nucleotides from the nucleotide sequence selected from SEQ ID NOs: 761 to 776. In some embodiments, the dsRNA includes an antisense strand having 11 contiguous nucleotides differing by no more than 2 nucleotides from the nucleotide sequence selected from SEQ ID NOs: 777 to 792. In some embodiments, the dsRNA includes a sense strand having 12 contiguous nucleotides differing by no more than 2 nucleotides from the nucleotide sequence selected from SEQ ID NOs: 761 to 776. In some embodiments, the dsRNA includes an antisense strand having 12 contiguous nucleotides differing by no more than 2 nucleotides from the nucleotide sequence selected from SEQ ID NOs: 777 to 792. In some embodiments, the dsRNA includes a sense strand having 13 contiguous nucleotides differing by no more than 2 nucleotides from the nucleotide sequence selected from SEQ ID NOs: 761 to 776. In some embodiments, the dsRNA includes an antisense strand having 13 contiguous nucleotides differing by no more than 2 nucleotides from the nucleotide sequence selected from SEQ ID NOs: 777 to 792. In some embodiments, the dsRNA includes a sense strand having 14 contiguous nucleotides differing by no more than 2 nucleotides from the nucleotide sequence selected from SEQ ID NOs: 761 to 776. In some embodiments, the dsRNA includes an antisense strand having 14 contiguous nucleotides differing by no more than 2 nucleotides from the nucleotide sequence selected from SEQ ID NOs: 777 to 792. In some embodiments, the dsRNA includes a sense strand having 15 contiguous nucleotides differing by no more than 2 nucleotides from the nucleotide sequence selected from SEQ ID NOs: 761 to 776. In some embodiments, the dsRNA includes an antisense strand having 15 contiguous nucleotides differing by no more than 2 nucleotides from the nucleotide sequence selected from SEQ ID NOs: 777 to 792. In some embodiments, the dsRNA includes a sense strand having 16 contiguous nucleotides differing by no more than 2 nucleotides from the nucleotide sequence selected from SEQ ID NOs: 761 to 776. In some embodiments, the dsRNA includes an antisense strand having 16 contiguous nucleotides differing by no more than 2 nucleotides from the nucleotide sequence selected from SEQ ID NOs: 777 to 792. In some embodiments, the dsRNA includes a sense strand having 17 contiguous nucleotides differing by no more than 2 nucleotides from the nucleotide sequence selected from SEQ ID NOs: 761 to 776. In some embodiments, the dsRNA includes an antisense strand having 17 contiguous nucleotides differing by no more than 2 nucleotides from the nucleotide sequence selected from SEQ ID NOs: 777 to 792. In some embodiments, the dsRNA includes a sense strand having 18 contiguous nucleotides differing by no more than 2 nucleotides from the nucleotide sequence selected from SEQ ID NOs: 761 to 776. In some embodiments, the dsRNA includes an antisense strand having 18 contiguous nucleotides differing by no more than 2 nucleotides from the nucleotide sequence selected from SEQ ID NOs: 777 to 792. In some embodiments, the dsRNA includes a sense strand having 19 contiguous nucleotides differing by no more than 2 nucleotides from the nucleotide sequence selected from SEQ ID NOs: 761 to 776. In some embodiments, the dsRNA includes an antisense strand having 19 contiguous nucleotides differing by no more than 2 nucleotides from the nucleotide sequence selected from SEQ ID NOs: 777 to 792. In some embodiments, the dsRNA includes a sense strand having 20 contiguous nucleotides differing by no more than 2 nucleotides from the nucleotide sequence selected from SEQ ID NOs: 761 to 776. In some embodiments, the dsRNA includes an antisense strand having 20 contiguous nucleotides differing by no more than 2 nucleotides from the nucleotide sequence selected from SEQ ID NOs: 777 to 792. In some embodiments, the dsRNA includes a sense strand having 21 contiguous nucleotides differing by no more than 2 nucleotides from the nucleotide sequence selected from SEQ ID NOs: 761 to 776. In some embodiments, the dsRNA includes an antisense strand having 21 contiguous nucleotides differing by no more than 2 nucleotides from the nucleotide sequence selected from SEQ ID NOs: 777 to 792.

[0355] In some embodiments, the dsRNA includes a sense strand having 10 contiguous nucleotides differing by no more than 1 nucleotide from the nucleotide sequence selected from SEQ ID NOs: 761 to 776. In some embodiments, the dsRNA includes an antisense strand having 10 contiguous nucleotides differing by no more than 1 nucleotide from the nucleotide sequence selected from SEQ ID NOs: 777 to 792. In some embodiments, the dsRNA includes a sense strand having 11 contiguous nucleotides differing by no more than 1 nucleotide from the nucleotide sequence selected from SEQ ID NOs: 761 to 776. In some embodiments, the dsRNA includes an antisense strand having 11 contiguous nucleotides differing by no more than 1 nucleotide from the nucleotide sequence selected from SEQ ID NOs: 777 to 792. In some embodiments, the dsRNA includes a sense strand having 12 contiguous nucleotides differing by no more than 1 nucleotide from the nucleotide sequence selected from SEQ ID NOs: 761 to 776. In some embodiments, the dsRNA includes an antisense strand having 12 contiguous nucleotides differing by no more than 1 nucleotide from the nucleotide sequence selected from SEQ ID NOs: 777 to 792. In some embodiments, the dsRNA includes a sense strand having 13 contiguous nucleotides differing by no more than 1 nucleotide from the nucleotide sequence selected from SEQ ID NOs: 761 to 776. In some embodiments, the dsRNA includes an antisense strand having 13 contiguous nucleotides differing by no more than 1 nucleotide from the nucleotide sequence selected from SEQ ID NOs: 777 to 792. In some embodiments, the dsRNA includes a sense strand having 14 contiguous nucleotides differing by no more than 1 nucleotide from the nucleotide sequence selected from SEQ ID NOs: 761 to 776. In some embodiments, the dsRNA includes an antisense strand having 14 contiguous nucleotides differing by no more than 1 nucleotide from the nucleotide sequence selected from SEQ ID NOs: 777 to 792. In some embodiments, the dsRNA includes a sense strand having 15 contiguous nucleotides differing by no more than 1 nucleotide from the nucleotide sequence selected from SEQ ID NOs: 761 to 776. In some embodiments, the dsRNA includes an antisense strand having 15 contiguous nucleotides differing by no more than 1 nucleotide from the nucleotide sequence selected from SEQ ID NOs: 777 to 792. In some embodiments, the dsRNA includes a sense strand having 16 contiguous nucleotides differing by no more than 1 nucleotide from the nucleotide sequence selected from SEQ ID NOs: 761 to 776. In some embodiments, the dsRNA includes an antisense strand having 16 contiguous nucleotides differing by no more than 1 nucleotide from the nucleotide sequence selected from SEQ ID NOs: 777 to 792. In some embodiments, the dsRNA includes a sense strand having 17 contiguous nucleotides differing by no more than 1 nucleotide from the nucleotide sequence selected from SEQ ID NOs: 761 to 776. In some embodiments, the dsRNA includes an antisense strand having 17 contiguous nucleotides differing by no more than 1 nucleotide from the nucleotide sequence selected from SEQ ID NOs: 777 to 792. In some embodiments, the dsRNA includes a sense strand having 18 contiguous nucleotides differing by no more than 1 nucleotide from the nucleotide sequence selected from SEQ ID NOs: 761 to 776. In some embodiments, the dsRNA includes an antisense strand having 18 contiguous nucleotides differing by no more than 1 nucleotide from the nucleotide sequence selected from SEQ ID NOs: 777 to 792. In some embodiments, the dsRNA includes a sense strand having 19 contiguous nucleotides differing by no more than 1 nucleotide from the nucleotide sequence selected from SEQ ID NOs: 761 to 776. In some embodiments, the dsRNA includes an antisense strand having 19 contiguous nucleotides differing by no more than 1 nucleotide from the nucleotide sequence selected from SEQ ID NOs: 777 to 792. In some embodiments, the dsRNA includes a sense strand having 20 contiguous nucleotides differing by no more than 1 nucleotide from the nucleotide sequence selected from SEQ ID NOs: 761 to 776. In some embodiments, the dsRNA includes an antisense strand having 20 contiguous nucleotides differing by no more than 1 nucleotide from the nucleotide sequence selected from SEQ ID NOs: 777 to 792. In some embodiments, the dsRNA includes a sense strand having 21 contiguous nucleotides differing by no more than 1 nucleotide from the nucleotide sequence selected from SEQ ID NOs: 761 to 776. In some embodiments, the dsRNA includes an antisense strand having 21 contiguous nucleotides differing by no more than 1 nucleotide from the nucleotide sequence selected from SEQ ID NOs: 777 to 792. In some embodiments, the dsRNA includes an antisense strand having 22 contiguous nucleotides differing by no more than 1 nucleotide from the nucleotide sequence selected from SEQ ID NOs: 777 to 792. In some embodiments, the dsRNA includes an antisense strand having 23 contiguous nucleotides differing by no more than 1 nucleotide from the nucleotide sequence selected from SEQ ID NOs: 777 to 792.

[0356] In some embodiments, the dsRNA includes (i) a sense strand having 15 contiguous nucleotides differing by no more than one, two or three nucleotides from the nucleotide sequence selected from SEQ ID NOs: 761 to 776 and (ii) an antisense strand forming a duplex with the sense strand of (i) and having 15 contiguous nucleotides differing by no more than one, two or three nucleotides from the nucleotide sequence selected from SEQ ID NOs: 777 to 792. In some embodiments, the dsRNA includes (i) a sense strand having 16 contiguous nucleotides differing by no more than one, two or three from the nucleotide sequence selected from SEQ ID NOs: 761 to 776 and (ii) an antisense strand forming a duplex with the sense strand of (i) and having 16 contiguous nucleotides differing by no more than one, two or three nucleotides from the nucleotide sequence selected from SEQ ID NOs: 777 to 792. In some embodiments, the dsRNA includes (i) a sense strand having 17 contiguous nucleotides differing by no more than one, two or three nucleotides from the nucleotide sequence selected from SEQ ID NOs: 761 to 776 and (ii) an antisense strand forming a duplex with the sense strand of (i) and having 17 contiguous nucleotides differing by no more than one, two or three nucleotides from the nucleotide sequence selected from SEQ ID NOs: 777 to 792. In some embodiments, the dsRNA includes (i) a sense strand having 18 contiguous nucleotides differing by no more than one, two or three nucleotides from the nucleotide sequence selected from SEQ ID NOs: 761 to 776 and (ii) an antisense strand forming a duplex with the sense strand of (i) and having 18 contiguous nucleotides differing by no more than one, two or three nucleotides from the nucleotide sequence selected from SEQ ID NOs: 777 to 792. In some embodiments, the dsRNA includes (i) a sense strand having 19 contiguous nucleotides differing by no more than one, two or three nucleotides from the nucleotide sequence selected from SEQ ID NOs: 761 to 776 and (ii) an antisense strand forming a duplex with the sense strand of (i) and having 19 contiguous nucleotides differing by no more than one, two or three nucleotides from the nucleotide sequence selected from SEQ ID NOs: 777 to 792. In some embodiments, the dsRNA includes (i) a sense strand having 20 contiguous nucleotides differing by no more than one, two or three nucleotides from the nucleotide sequence selected from SEQ ID NOs: 761 to 776 and (ii) an antisense strand forming a duplex with the sense strand of (i) and having 20 contiguous nucleotides differing by no more than one, two or three nucleotides from the nucleotide sequence selected from SEQ ID NOs: 777 to 792. In some embodiments, the dsRNA includes (i) a sense strand having 21 contiguous nucleotides differing by no more than one, two or three nucleotides from the nucleotide sequence selected from SEQ ID NOs: 761 to 776 and (ii) an antisense strand forming a duplex with the sense strand of (i) and having 21 contiguous nucleotides differing by no more than one, two or three nucleotides from the nucleotide sequence selected from SEQ ID NOs: 777 to 792.

[0357] In certain aspects, when a sense strand or an antisense strand of a dsRNA in above paragraphs is differing by a certain number of nucleotides (e.g., one, two or three nucleotides) from a specific sequence (e.g., SEQ ID NOs: 3 to 792), it is meant by that the sense strand or the antisense strand of the dsRNA includes one, two or three nucleotides having different nucleobases compared to the nucleobases of the nucleotides at the corresponding positions of the specific sequence (e.g., SEQ ID NOs: 3 to 792).

### Modification Pattern

[0358] In an aspect, the disclosure provides a set of modification patterns determined or arranged by modified nucleotides in dsRNAs described herein. Aside from or in addition to the nucleobase sequences, various arrangements of modified nucleotides and the modification patterns thereof can be introduced, for example, to increase stability in a biological or physiological surrounding, to facilitate or promote cleavage by the RNA-induced silencing complex, and/or to mitigate or reduce off-targeting risk (e.g., to PCSK9 off-targeting risk).

[0359] In an aspect, the disclosure provides a dsRNA that is partially (e.g., greater than about 1%, 5%, 10%, 15%, 20%, 25%, 30%, 35%, 40%, or 45% of the total nucleotides), substantially (e.g., greater than about 50%, 55%, 60%, 65%, 70%, 75%, 80%, 85%, 90%, or 95% of the total nucleotides), or entirely made of modified nucleotides, which can provide improved resistance to chemical and/or nuclease digestion and increased in vivo stability thereby imposing a longer in vivo half-life. Further, increasing the in vivo half-life of the dsRNA results in enhanced bioavailability and enhanced effectiveness in inhibiting expression or activity of a target gene (e.g., human PCSK9). For example, the stability of dsRNA in blood or serum may be determined, e.g., by its susceptibility to degradation by the cellular enzymes, which may be dependent on the characteristics (e.g., sequences, modification, modification pattern, or other chemical moieties) of each strand (i.e., sense strand or antisense strand) of the dsRNA. In certain aspects, the efficiency of dsRNA as a therapeutic agent may be improved by increasing the in vivo stability (e.g., in blood or serum) of the dsRNA while maintaining the ability of the dsRNA to mediate RNA interference in vivo.

### Modified Nucleotides

[0360] The modified nucleotides as used herein contain one or more modifications, for example, the modified nucleotides contain at least one chemical modification or replacement in an internucleoside linkage (“linkage”), a nucleobase, and/or a sugar moiety of the nucleotide. Non-limiting examples include a 2′-modification on a ribose sugar ring (e.g., 2′-deoxy, 2′-O-alkyl, 2′-halo, 2′-O-alkoxyalkyl, 2′-O-amino alkyl, etc.), 3′-modification (e.g., substitution) in backbone phosphate group (or phosphodiester linkage), or 4′-modification on a ribose sugar ring (e.g., 4′-thio RNA). Also, other non-limiting examples of modifications may include one or more modifications selected from a deoxy modification, a 2′-O-alkyl modification, a 2′-halo modification, a 2′-5′-linkage modification, a conformationally restricting modification, an abasic modification, a 2′-amino-modification, a 2′-O-allyl modification, 2′-C-alkyl modification, a 2′-O-alkoxyalkyl modification, a morpholino modification, a modification containing a phosphoramidate group, a non-natural nucleobase modification, a modification in a tetrahydropyran, a threofuranosyl nucleotide (TNA) modification, a modification containing a 1,5-anhydrohexitol, a modification containing a cyclohexyl, a modification containing a cyclohexenyl, a modification containing a phosphorothioate group, a modification containing a methylphosphonate group, a modification containing an alkylphosphate, a modification containing a phosphonate, a modification containing an alkylphosphonate, a modification to form a thermally destabilizing nucleotide, a glycol nucleic acid (GNA) modification, and a 2-O—(N-methylacetamide) modification. For example, a modified nucleotide may include a single modification, or two or more modifications at the positions at which the chemical modification groups do not hinder or intervene each other.

[0361] In some embodiments, each of the modified nucleotides is independently selected from TNA, GNA, LNA, 2′-O-alkoxyalkyl modified nucleotide, 2′-O-alkyl modified nucleotide, 2′-O-allyl modified nucleotide, 2′-C-allyl modified nucleotide, 2′-halo modified nucleotide, and 2′-deoxy modified nucleotide (DNA). In some embodiments, each of the modified nucleotides contain independently selected from TNA modification, GNA modification, LNA modification, 2′-O-alkoxyalkyl modification, 2′-O-alkyl modification, 2′-O-allyl modification, 2′-C-allyl modification, 2′-halo modification, and 2′-deoxy modification (DNA). The term alkyl, alkoxyl, allyl, amino, and halo can be interpreted as described above. In some embodiments, the modified nucleotides include at least one TNAs. In some embodiments, the modified nucleotides include at least one GNAs. In some embodiments, the modified nucleotides include at least one LNAs. In some embodiments, the modified nucleotides include at least one 2′-O-alkoxyalkyl modified nucleotides. In some embodiments, the modified nucleotides include at least one 2′-O-alkyl modified nucleotides. In some embodiments, the modified nucleotides include at least one 2′-O-allyl modified nucleotides. In some embodiments, the modified nucleotides include at least one 2′-C-allyl modified nucleotides. In some embodiments, the modified nucleotides include at least one 2′-halo (e.g., —F) modified nucleotides. In some embodiments, the modified nucleotides include at least one 2′-deoxy modified nucleotides (DNA).

[0362] In some embodiments, the modified nucleotide may be a bicyclic (or bridged) nucleic acid (“BNA”) having a covalent linkage between the 2′ and 4′ carbons on a ribose sugar. In some embodiments, the modified nucleotide is a locked RNA (“LNA”) having covalent linkage of a bicyclic sugar modification is a 4′-CH₂—O-2′ linkage (methylene oxy), also known as “LNA having a structure of e.g.,

[chemical structure]

or a pharmaceutically acceptable salt thereof, wherein [symbol] is an attachment point to the adjacent nucleotides.

[0363] In some embodiments, a ribose ring may be replaced with a glycol moiety linked to phosphate and the GNA includes a moiety of

[chemical structure]

or a pharmaceutically acceptable salt thereof. In some embodiments, the GNA may have a structure of

[chemical structure]

or a pharmaceutically acceptable salt thereof. In some embodiments, the phosphodiester linkage in the GNA may be modified, e.g., with phosphorothioate group and modified GNA may have the structure of

[chemical structure]

or a pharmaceutically acceptable salt thereof. The GNA may further include one or more substituents replacing hydrogen(s) and such modified GNA may be encompassed by the definition of GNA herein.

[0364] In some embodiments, a ribose pentofuranosyl ring may be replaced with a threofuranosyl ring linked to the phosphate and a threofuranosyl nucleotide (TNA) may include a moiety of

[chemical structure]

or a pharmaceutically acceptable salt thereof. In some embodiments, the TNA may have a structure of

[chemical structure]

or a pharmaceutically acceptable salt thereof. In some embodiments, the phosphodiester linkage in the TNA may be modified, e.g., with phosphorothioate group and modified TNA may include a structure of

[chemical structure]

or a pharmaceutically acceptable salt thereof. The TNA may further include one or more substituents at 1′, 3′ and/or 4′ positions and such modified TNA may be encompassed by the definition of TNA herein.

[0365] In certain aspects, the modified nucleotide may include a heterocyclic group (e.g., 5 to 6 membered heterocycloalkyl ring) in place of a ribose ring. In some embodiments, the ribose ring may be replaced with a morpholinyl ring, e.g., to form an morpholino oligonucleotide. In some embodiments, the ribose ring may be replaced with an arabinose ring.

[0366] In certain aspects, the modified nucleotides contain one or more modification groups at 2′ position on the ribose ring by replacing 2′-OH. In some embodiments, the modification group may include one or more selected from hydrogen (i.e. deoxy), halogen (e.g., —F), substituted or unsubstituted alkyl (e.g., C₁-C₁₂ alkyl), substituted or unsubstituted heteroalkyl (e.g., —O—(C₁-C₁₂ alkyl), —N—(C₁-C₁₂ alkyl), —C(O)NH—(C₁-C₁₂ alkyl), —NHC(O)—(C₁-C₁₂ alkyl), and —C(O)—(C₁-C₁₂ alkyl)). In some embodiments, the modification group may be hydrogen, —F, —O-alkyl (e.g., C₁-C₄ alkyl), or —O-alkoxyalkyl (e.g., —O—(C₁-C₄ alkylene)-(C₁-C₄ alkoxyl)). Any of the alkyl, heteroalkyl, alkylene in the disclosure are optionally substituted with one or more of hydroxyl (—OH), C₁-C₃ alkyl (e.g., methyl, or ethyl), amine (e.g., monoamine or diamine), alkoxyl (e.g., —O—CH₃ (OMe) or —O—CH₂CH₃ (OEt)), halogen (e.g., —F) or the like.

[0367] In certain aspects, the modified nucleotides may include one or more of 2′-deoxy modification, 2′-O-alkyl modification, 2′-O-substituted alkyl modification, 2′-O-alkoxyalkyl modification, and 2′-O-aminoalkyl modification. In some embodiments, the modified nucleotides may include one or more of 2′-deoxy modification, 2′-O-alkyl modification, 2′-O-substituted alkyl modification, 2′-O-alkoxyalkyl modification, and 2′-O-aminoalkyl modification. In some embodiments, the modified nucleotides include at least one GNAs. In some embodiments, the modified nucleotides include at least one 2′-O-alkoxyalkyl modifications. In some embodiments, the modified nucleotides include at least one 2′-O-alkyl modifications. In some embodiments, the modified nucleotides include at least one 2′-O-allyl modifications. In some embodiments, the modified nucleotides include at least one 2′-C-allyl modifications. In some embodiments, the modified nucleotides include at least one 2′-halo (e.g., —F) modifications. In some embodiments, the modified nucleotides include at least one 2′-deoxy modifications (DNA). In some embodiments, the modified nucleotides do not include 2′-deoxy modifications (DNA).

[0368] In certain aspects, the modified nucleotides may include one or more of 2′-deoxy nucleotide (DNA), 2′-O-methyl (2′-OMe) modification, 2′-flouro (2′-F) modification, 2′-O-methoxyethyl (2′-O-MOE or “2′-MOE”) modification, 2′-O-aminopropyl (2′-O-AP) modification, 2′-O-dimethylaminoethyl (2′-O-DMAOE) modification, 2′-O-dimethylaminopropyl (2′-O-DMAP) modification, 2′-O-dimethylaminoethyloxyethyl (2′-O-DMAEOE) modification, and 2′-O—N-methylacetamido (2′-O-NMA) modification. In some embodiments, the modified nucleotides may include at least one 2′-deoxy modification (DNA). In some embodiments, the modified nucleotides may include at least one 2′-O-methyl (2′-OMe) modification. In some embodiments, the modified nucleotides may include at least one 2′-flouro (2′-F) modification. In some embodiments, the modified nucleotides may include at least one 2′-O-methoxyethyl (2′-O-MOE or “2′-MOE”) modification. In some embodiments, the modified nucleotides may include at least one 2′-O-aminopropyl (2′-O-AP) modification. In some embodiments, the modified nucleotides may include at least one 2′-O-dimethylaminoethyl (2′-O-DMAOE) modification. In some embodiments, the modified nucleotides may include at least one 2′-O-dimethylaminopropyl (2′-O-DMAP) modification. In some embodiments, the modified nucleotides may include at least one 2′-O-dimethylaminoethyloxyethyl (2′-O-DMAEOE) modification. In some embodiments, the modified nucleotides may include at least one 2′-O—N-methylacetamido (2′-O-NMA) modification.

[0369] In some embodiments, each modified nucleotide containing a modification on a 2′ sugar ring may optionally contain a phosphorothioate group at 5′ or 3′ linkage. In some embodiments, each modified nucleotide containing a modification on a 2′ sugar ring may optionally contain a modification such as an abasic modification (absence of a nucleobase) or methylated nucleobase modification at nucleobase (e.g., thymine (T) or 5-methyl cytosine (5mC)).

[0370] In certain aspects, the dsRNA is partially (e.g., greater than about 1%, 5%, 10%, 15%, 20%, 25%, 30%, 35%, 40%, or 45% of the total nucleotides), substantially (e.g., greater than about 50%, 55%, 60%, 65%, 70%, 75%, 80%, 85%, 90%, or 95% of the total nucleotides), or entirely made of modified nucleotides containing the modification on 2′ sugar ring. In some embodiments, the dsRNA is partially (e.g., greater than about 1%, 5%, 10%, 15%, 20%, 25%, 30%, 35%, 40%, or 45% of the total nucleotides) made of modified nucleotides containing the modification on 2′ sugar ring. In some embodiments, the dsRNA is substantially (e.g., greater than about 50%, 55%, 60%, 65%, 70%, 75%, 80%, 85%, 90%, or 95% of the total nucleotides) made of modified nucleotides containing the modification on 2′ sugar ring. In some embodiments, the dsRNA includes greater than about 80% of modified nucleotides containing the modification on 2′ sugar ring based on the total nucleotides. In some embodiments, the dsRNA includes greater than about 85% of modified nucleotides containing the modification on 2′ sugar ring based on the total nucleotides. In some embodiments, the dsRNA includes greater than about 90% of modified nucleotides containing the modification on 2′ sugar ring based on the total nucleotides. In some embodiments, the dsRNA includes greater than about 95% of modified nucleotides containing the modification on 2′ sugar ring based on the total nucleotides. In some embodiments, the dsRNA is entirely made of modified nucleotides containing the modification on 2′ sugar ring.

[0371] In certain aspects, the modified nucleotide may include a modification in a phosphate or phosphodiester linkage, in other words, an internucleoside linkage modification (e.g., phosphorothioate, phosphorodithioate, methylphosphonate, methylene phosphonate, or vinyl phosphonate (VP) linkage). In some embodiments, the linkage modification may include phosphorothioate (PS) having a structure of

[chemical structure]

which may be an Rp isomer or an Sp isomer. In some embodiments, the linkage modification may include phosphorothioate (PS) having a structure of

[chemical structure]

which may be a stereopure Rp isomer. In some embodiments, the linkage modification may include phosphorothioate (PS) having a structure of

[chemical structure]

which may be a stereopure Sp isomer.

[0372] For example, the modified nucleotide including 3′-PS modification can be represented as

[chemical structure]

or a pharmaceutically acceptable salt thereof, wherein R represents H, OH or a substituent (e.g., —F, —CH₃, —OMe, or MOE) and [symbol] is an attachment point to the adjacent nucleotides. In some embodiments, the 3′-PS group may be a stereopure Sp isomer. In some embodiments, the 3′-PS group may be a stereopure Rp isomer.

[0373] In certain aspects, the dsRNAi agent may be entirely made of modified nucleotides having one or more internucleoside linkage modification and/or modifications in the sugar moieties of the nucleotides.

[0374] In certain aspects, the first nucleotide from the 5′ end of each strand (e.g., sense strand and antisense strand) may include an additional phosphate group or a variant thereof (e.g., phosphorothioate, phosphorodithioate, methylphosphonate, methylene phosphonate, or vinyl phosphonate (VP)) attached or linked to the 5′ terminal group of the first nucleotide.

[0375] In some embodiments, the first nucleotide from the 5′ end of each strand (e.g., sense strand and antisense strand) includes a 5′-vinyl phosphonate (5′-VP) group that is a chemical moiety having the structure of

[chemical structure]

or a pharmaceutically acceptable salt thereof, wherein [symbol] represents the point of attachment to the 5′ carbon of the pentofuranosyl sugar of a nucleotide. In some embodiments, the first nucleotide from the 5′ end of each strand (e.g., sense strand and antisense strand) may include (E)-vinyl phosphonate (VP) having a structure of

[chemical structure]

or a pharmaceutically acceptable salt thereof, wherein [symbol] represents the point of attachment to the 4′ carbon of the pentofuranosyl sugar. In some embodiments, the first nucleotide from the 5′ end of each strand (e.g., sense strand and antisense strand) may include (Z)-vinyl phosphonate having a structure of

[chemical structure]

or a pharmaceutically acceptable salt thereof, wherein [symbol] represents the point of attachment to the 4′ carbon of the pentofuranosyl sugar.

[0376] In certain aspects, one or more of the modified nucleotides contain a 2′ modification (e.g., 2′-OMe, 2′-F, 2′-MOE, 2′-deoxy, etc.) and an internucleoside linkage modification (e.g., phosphorothioate or (E)-vinyl phosphonate). In some embodiments, one or more of the modified nucleotides contain 2′-OMe modification and phosphorothioate group. In some embodiments, one or more of the modified nucleotides contain 2′-OMe modification and (E)-vinyl phosphonate group. In some embodiments, one or more of the modified nucleotides contain 2′-F modification and phosphorothioate group. In some embodiments, one or more of the modified nucleotides contain 2′-F and (E)-vinyl phosphonate group. In some embodiments, one or more of the modified nucleotides contain 2′-MOE modification and phosphorothioate group. In some embodiments, one or more of the modified nucleotides contain 2′-MOE modification and (E)-vinyl phosphonate group. In some embodiments, one or more of the modified nucleotides contain 2′-deoxy modification and phosphorothioate group. In some embodiments, one or more of the modified nucleotides contain 2′-OMe modification and (E)-vinyl phosphonate group. In some embodiments, one or more of the modified nucleotides are GNA containing (E)-vinyl phosphonate group. In some embodiments, one or more of the modified nucleotides are GNA containing a phosphorothioate group. In some embodiments, one or more of the modified nucleotides are TNA containing (E)-vinyl phosphonate group. In some embodiments, one or more of the modified nucleotides are TNA containing a phosphorothioate group.

[0377] In certain aspects, the modified nucleotides contain one or more modifications on a modified nucleobase. In some embodiments, one or more of the modified nucleotides may include thymine (“T”) nucleobase (“ribothymidine” or “5-methyluridine”) in the ribonucleotide (e.g., including 2′-OH). In some embodiments, one or more of the modified nucleotides may include methylcytosine nucleobase (e.g., 5-methylcytidine or N4-methylcytidine). In certain aspects, one or more of the modified nucleotides may contain no nucleobase or be abasic.

### Sense Strand (SS)

[0378] In certain aspects, a sense strand of the dsRNA as described herein are substantially (e.g., greater than about 80%, 85%, 90%, or 95% of the total nucleotides) made of modified nucleotides. In another certain aspect, the sense strand is entirely made of modified nucleotides.

[0379] In certain aspects, a sense strand of the dsRNA as described herein includes two or more 2′-MOE modifications. In some embodiments, the sense strand includes two, four, six or eight 2′-MOE modifications. In some embodiments, the sense strand includes two 2′-MOE modifications. In some embodiments, the sense strand includes four 2′-MOE modifications. In some embodiments, the sense strand includes six 2′-MOE modifications. In some embodiments, the sense strand includes eight 2′-MOE modifications.

[0380] In some embodiments, the 2′-MOE modified nucleotides in the sense strand as described herein include a structure of

[chemical structure]

or a pharmaceutically acceptable salt thereof, wherein [symbol] is an attachment point to a linkage (e.g., phosphate or phosphorothioate group) or the adjacent nucleotides and “Base” is a nucleobase.

[0381] In some embodiments, the 2′-MOE modified nucleotides in the sense strand as described herein include a structure of

[chemical structure]

or a pharmaceutically acceptable salt thereof, wherein [symbol] is an attachment point to a terminal group (e.g., H, OH, or salt) or the adjacent nucleotides and “Base” is a nucleobase. In some embodiments, the 2′-MOE modified nucleotides in the sense strand as described herein include a structure of

[chemical structure]

or a pharmaceutically acceptable salt thereof.

[0382] In some embodiments, the 2′-MOE modified nucleotides include a structure of

[chemical structure]

or a pharmaceutically acceptable salt thereof, wherein [symbol] is an attachment point to a terminal group (e.g., H, OH, or salt) or the adjacent nucleotides. In some embodiments, the 2′-MOE modified nucleotides include a structure of

[chemical structure]

or a pharmaceutically acceptable salt thereof. In some embodiments, the 2′-MOE modified nucleotides include a structure of

[chemical structure]

or a pharmaceutically acceptable salt thereof.

[0383] In some embodiments, the 2′-MOE modified nucleotides include a nucleotide having a structure of

[chemical structure]

or a pharmaceutically acceptable salt thereof, wherein [symbol] is an attachment point to a terminal group (e.g., H, OH, or salt) or the adjacent nucleotides. In some embodiments, the 2′-MOE modified nucleotides include a nucleotide having a structure of

[chemical structure]

or a pharmaceutically acceptable salt thereof. In some embodiments, the 2′-MOE modified nucleotides include a nucleotide having a structure of

[chemical structure]

or a pharmaceutically acceptable salt thereof. In some embodiments, the 2′-MOE modified nucleotides include a nucleotide having a structure of

[chemical structure]

or a pharmaceutically acceptable salt thereof.

[0384] In some embodiments, the 2′-MOE modified nucleotides in the sense strand as described herein include a nucleotide having a structure of

[chemical structure]

[chemical structure]

or a pharmaceutically acceptable salt thereof, wherein [symbol] is an attachment point to a terminal group (e.g., H, OH, or salt) or the adjacent nucleotides. In some embodiments, the 2′-MOE modified nucleotides in the sense strand as described herein include a nucleotide having a structure of

[chemical structure]

or a pharmaceutically acceptable salt thereof.

[0385] In some embodiments, the 2′-MOE modified nucleotides include a nucleotide having a structure of

[chemical structure]

or a pharmaceutically acceptable salt thereof, wherein [symbol] is an attachment point to a terminal group (e.g., H, OH, or salt) or the adjacent nucleotides. In some embodiments, the 2′-MOE modified nucleotides include a nucleotide having a structure of

[chemical structure]

or a pharmaceutically acceptable salt thereof.

[0386] In certain aspects, at least one of the 2′-MOE modified nucleotides in the sense strand as described herein has a structure of

[chemical structure]

or a pharmaceutically acceptable salt thereof, wherein [symbol] is an attachment point to a terminal group (e.g., H, OH, or salt) or the adjacent nucleotides. In some embodiments, at least one of the 2′-MOE modified nucleotides in the sense strand as described herein has a structure of

[chemical structure]

or a pharmaceutically acceptable salt thereof.

[0387] In some embodiments, the first nucleotide from the 5′ end of the sense strand includes a structure of

[chemical structure]

or a pharmaceutically acceptable salt thereof. In some embodiments, the first nucleotide from the 5′ end of the sense strand includes a structure of

[chemical structure]

or a pharmaceutically acceptable salt thereof.

[0388] In some embodiments, the first nucleotide from the 3′ end of the sense strand includes a structure of

[chemical structure]

or a pharmaceutically acceptable salt thereof. In some embodiments, the first nucleotide from the 3′ end of the sense strand includes a structure of

[chemical structure]

or a pharmaceutically acceptable salt thereof, wherein [symbol] is an attachment point to a ligand. In some embodiments, the first nucleotide from the 3′ end of the sense strand includes a structure of

[chemical structure]

or a pharmaceutically acceptable salt thereof.

[0389] In certain aspects, at least one of the 2′-MOE modified nucleotides in the sense strand as described herein has a structure of

[chemical structure]

or a pharmaceutically acceptable salt thereof, wherein [symbol] is an attachment point to a terminal group (e.g., H, OH, or salt) or the adjacent nucleotides. In some embodiments, at least one of the 2′-MOE modified nucleotides in the sense strand as described herein has a structure of

[chemical structure]

or a pharmaceutically acceptable salt thereof.

[0390] In some embodiments, the first nucleotide from the 5′ end of the sense strand includes a structure of

[chemical structure]

or a pharmaceutically acceptable salt thereof. In some embodiments, the first nucleotide from the 5′ end of the sense strand includes a structure of

[chemical structure]

or a pharmaceutically acceptable salt thereof.

[0391] In some embodiments, the first nucleotide from the 3′ end of the sense strand includes a structure of

[chemical structure]

or a pharmaceutically acceptable salt thereof. In some embodiments, the first nucleotide from the 3′ end of the sense strand includes a structure of

[chemical structure]

[chemical structure]

or a pharmaceutically acceptable salt thereof, wherein [symbol] is an attachment point to a ligand. In some embodiments, the first nucleotide from the 3′ end of the sense strand includes a structure of

[chemical structure]

or a pharmaceutically acceptable salt thereof.

[0392] In certain aspects, at least one of the 2′-MOE modified nucleotides in the sense strand as described herein has a structure of

[chemical structure]

or a pharmaceutically acceptable salt thereof, wherein [symbol] is an attachment point to a terminal group (e.g., H, OH, or salt) or the adjacent nucleotides. In some embodiments, at least one of the 2′-MOE modified nucleotides in the sense strand as described herein has a structure of

[chemical structure]

or a pharmaceutically acceptable salt thereof.

[0393] In some embodiments, the first nucleotide from the 5′ end of the sense strand includes a structure of

[chemical structure]

or a pharmaceutically acceptable salt thereof. In some embodiments, the first nucleotide from the 5′ end of the sense strand includes a structure of

[chemical structure]

or a pharmaceutically acceptable salt thereof.

[0394] In some embodiments, the first nucleotide from the 3′ end of the sense strand has a structure of

[chemical structure]

or a pharmaceutically acceptable salt thereof. In some embodiments, the first nucleotide from the 3′ end of the sense strand has a structure of

[chemical structure]

[chemical structure]

or a pharmaceutically acceptable salt thereof, wherein [symbol] is an attachment point to a ligand. In some embodiments, the first nucleotide from the 3′ end of the sense strand has a structure of

[chemical structure]

or a pharmaceutically acceptable salt thereof.

[0395] In certain aspects, at least one of the 2′-MOE modified nucleotides in the sense strand as described herein has a structure of

[chemical structure]

or a pharmaceutically acceptable salt thereof, wherein [symbol] is an attachment point to a terminal group (e.g., H, OH, or salt) or the adjacent nucleotides. In some embodiments, at least one of the 2′-MOE modified nucleotides in the sense strand as described herein has a structure of

[chemical structure]

for a pharmaceutically acceptable salt thereof.

[0396] In some embodiments, the first nucleotide from the 5′ end of the sense strand includes a structure of

[chemical structure]

or a pharmaceutically acceptable salt thereof. In some embodiments, the first nucleotide from the 5′ end of the sense strand includes a structure of

[chemical structure]

or a pharmaceutically acceptable salt thereof.

[0397] In some embodiments, the first nucleotide from the 3′ end of the sense strand has a structure of

[chemical structure]

or a pharmaceutically acceptable salt thereof. In some embodiments, the first nucleotide from the 3′ end of the sense strand has a structure of

[chemical structure]

or a pharmaceutically acceptable salt thereof, wherein [symbol] is an attachment point to a ligand. In some embodiments, the first nucleotide from the 3′ end of the sense strand has a structure of

[chemical structure]

or a pharmaceutically acceptable salt thereof.

[0398] In certain aspects, the 2′-MOE modified nucleotides locate at both 5′ and 3′ ends of a sense strand so as to form a structural confinement (“2′-MOE clamp”) at the sense strand termini. In some embodiments, the 2′-MOE clamps may be symmetric and having the same number of 2′-MOE modified nucleotides at both 5′ and 3′ ends of the sense strand. For example, the sense strand includes one 2′-MOE modified nucleotide at 5′ end and one 2′-MOE modified nucleotide at 3′ end; two 2′-MOE modified nucleotides at 5′ end and two 2′-MOE modified nucleotides at 3′ end; or three 2′-MOE modified nucleotides at 5′ end and three 2′-MOE modified nucleotides at 3′ end. In some embodiments, the 2′-MOE clamps may be asymmetric and having different numbers of 2′-MOE nucleotides at 5′ and 3′ ends of the sense strand. For example, the sense strand includes one 2′-MOE modified nucleotide at 5′ end only; one 2′-MOE modified nucleotide at 3′ end only; two 2′-MOE modified nucleotides at 5′ end only; two 2′-MOE modified nucleotides at 3′ end only; one 2′-MOE modified nucleotide at 5′ end and two 2′-MOE modified nucleotides at 3′ end; or two 2′-MOE modified nucleotides at 5′ end and one 2′-MOE modified nucleotide at 3′ end.

[0399] In certain aspects, the sense strand includes one 2′-MOE modified nucleotide at 5′ end and one 2′-MOE modified nucleotide at 3′ end. In some embodiments, the sense strand includes only one 2′-MOE modified nucleotide at 5′ end and only one 2′-MOE modified nucleotide at 3′ end. In some embodiments, the sense strand includes only one 2′-MOE modified nucleotide at 5′ end. In some embodiments, the sense strand includes only one 2′-MOE modified nucleotide at 3′ end.

[0400] In certain aspects, the sense strand includes at least two contiguous 2′-MOE modified nucleotides at 5′ end and at least two 2′-MOE modified nucleotides at 3′ end. In some embodiments, the sense strand includes only two 2′-MOE modified nucleotides at 5′ end and only two 2′-MOE modified nucleotides at 3′ end. In some embodiments, the sense strand includes only two 2′-MOE modified nucleotides at 5′ end. In some embodiments, the sense strand includes only two 2′-MOE modified nucleotides at 3′ end.

[0401] In certain aspects, the sense strand includes one or two contiguous 2′-MOE modified nucleotides at 5′ end and/or one or two contiguous 2′-MOE modified nucleotides at 3′ end, where the sense strand comprises a nucleotide sequence selected from SEQ ID NOs: 761-776. In some embodiments, the nucleotide sequence of the sense strand comprises SEQ ID NO: 761. In some embodiments, the nucleotide sequence of the sense strand comprises SEQ ID NO: 762. In some embodiments, the nucleotide sequence of the sense strand comprises SEQ ID NO: 763. In some embodiments, the nucleotide sequence of the sense strand comprises SEQ ID NO: 764. In some embodiments, the nucleotide sequence of the sense strand comprises SEQ ID NO: 765. In some embodiments, the nucleotide sequence of the sense strand comprises SEQ ID NO: 766. In some embodiments, the nucleotide sequence of the sense strand comprises SEQ ID NO: 767. In some embodiments, the nucleotide sequence of the sense strand comprises SEQ ID NO: 768. In some embodiments, the nucleotide sequence of the sense strand comprises SEQ ID NO: 769. In some embodiments, the nucleotide sequence of the sense strand comprises SEQ ID NO: 770. In some embodiments, the nucleotide sequence of the sense strand comprises SEQ ID NO: 771. In some embodiments, the nucleotide sequence of the sense strand comprises SEQ ID NO: 772. In some embodiments, the nucleotide sequence of the sense strand comprises SEQ ID NO: 773. In some embodiments, the nucleotide sequence of the sense strand comprises SEQ ID NO: 774. In some embodiments, the nucleotide sequence of the sense strand comprises SEQ ID NO: 775. In some embodiments, the nucleotide sequence of the sense strand comprises SEQ ID NO: 776.

[0402] In certain aspects, the sense strand is 21 nucleotides in length. In some embodiments, the sense strand includes one, two, three, or four 2′-MOE modified nucleotides positioned at the 1st, 2nd, 20th, and/or 21st nucleotides from the 5′ end of the sense strand. In some embodiments, the sense strand includes two 2′-MOE modified nucleotides positioned at the 1st, 2nd, 20th, or 21st nucleotides from the 5′ end of the sense strand. In some embodiments, the sense strand includes three 2′-MOE modified nucleotides positioned at the 1st, 2nd, 20th, or 21st nucleotides from the 5′ end of the sense strand. In some embodiments, the sense strand includes 2′-MOE modified nucleotides positioned at the 1st, 2nd, 20th, and 21st nucleotides from the 5′ end of the sense strand. In some embodiments, the sense strand does not include a 2′-MOE modified nucleotide at the 3rd to 19th nucleotides from 5′ end of the sense strands.

[0403] Alternatively, in certain aspects, a sense strand of the dsRNA as described herein includes two or more TNAs. In some embodiments, the sense strand includes two, four, six or eight TNAs. In some embodiments, the sense strand includes two TNAs. In some embodiments, the sense strand includes four TNAs. In some embodiments, the sense strand includes six TNAs. In some embodiments, the sense strand includes eight TNAs.

[0404] In certain aspects, the sense strand includes at least two contiguous TNAs at 5′ end and at least two TNAs at 3′ end. In some embodiments, the sense strand includes only two TNAs at 5′ end and only two TNAs at 3′ end. In some embodiments, the sense strand includes only two TNAs at 5′ end. In some embodiments, the sense strand includes only two TNAs at 3′ end.

[0405] In some embodiments, the TNAs in the sense strand as described herein include a structure of

[chemical structure]

or a pharmaceutically acceptable salt thereof, wherein [symbol] is an attachment point to a linkage (e.g., phosphate or phosphorothioate group) or the adjacent nucleotides and “Base” is a nucleobase.

[0406] In some embodiments, the TNAs in the sense strand as described herein include a structure of

[chemical structure]

or a pharmaceutically acceptable salt thereof, wherein [symbol] is an attachment point to a terminal group (e.g., H, OH, or salt) or the adjacent nucleotides and “Base” is a nucleobase. In some embodiments, the TNAs in the dsRNA as described herein include a structure of

[chemical structure]

or a pharmaceutically acceptable salt thereof.

[0407] In some embodiments, the TNAs include a structure of

[chemical structure]

or a pharmaceutically acceptable salt thereof, wherein [symbol] is an attachment point to a terminal group (e.g., H, OH, or salt) or the adjacent nucleotides. In some embodiments, the TNAs include a structure of

[chemical structure]

or a pharmaceutically acceptable salt thereof.

[0408] In some embodiments, the TNAs include a nucleotide having a structure of

[chemical structure]

or a pharmaceutically acceptable salt thereof, wherein [symbol] is an attachment point to a terminal group (e.g., H, OH, or salt) or the adjacent nucleotides. In some embodiments, the TNAs include a nucleotide having a structure of

[chemical structure]

or a pharmaceutically acceptable salt thereof.

[0409] In some embodiments, the TNAs in the dsRNA as described herein include a nucleotide having a structure of

[chemical structure]

or a pharmaceutically acceptable salt thereof, wherein [symbol] is an attachment point to a terminal group (e.g., H, OH, or salt) or the adjacent nucleotides. In some embodiments, the TNAs in the dsRNA as described herein include a nucleotide having a structure of

[chemical structure]

or a pharmaceutically acceptable salt thereof.

[0410] In some embodiments, the TNAs include a nucleotide having a structure of

[chemical structure]

or a pharmaceutically acceptable salt thereof, wherein [symbol] is an attachment point to a terminal group (e.g., H, OH, or salt) or the adjacent nucleotides. In some embodiments, the TNAs include a nucleotide having a structure of

[chemical structure]

or a pharmaceutically acceptable salt thereof.

[0411] In certain aspects, at least one of the TNAs in the sense strand as described herein has a structure of

[chemical structure]

or a pharmaceutically acceptable salt thereof, wherein [symbol] is an attachment point to a terminal group (e.g., H, OH, or salt) or the adjacent nucleotides. In some embodiments, at least one of the TNAs in the sense strand as described herein has a structure of

[chemical structure]

or a pharmaceutically acceptable salt thereof.

[0412] In some embodiments, the first nucleotide from the 5′ end of the sense strand includes a structure of

[chemical structure]

or a pharmaceutically acceptable salt thereof. In some embodiments, the first nucleotide from the 5′ end of the sense strand includes a structure of

[chemical structure]

or a pharmaceutically acceptable salt thereof.

[0413] In some embodiments, the first nucleotide from the 3′ end of the sense strand includes a structure of

[chemical structure]

or a pharmaceutically acceptable salt thereof. In some embodiments, the first nucleotide from the 3′ end of the sense strand includes a structure of

[chemical structure]

or a pharmaceutically acceptable salt thereof and [symbol] is an attachment point to a ligand. In some embodiments, the first nucleotide from the 3′ end of the sense strand includes a structure of

[chemical structure]

or a pharmaceutically acceptable salt thereof.

[0414] In certain aspects, at least one of the TNAs in the sense strand as described herein has a structure of

[chemical structure]

or a pharmaceutically acceptable salt thereof, wherein [symbol] is an attachment point to a terminal group (e.g., H, OH, or salt) or the adjacent nucleotides. In some embodiments, at least one of the TNAs in the sense strand as described herein has a structure of

[chemical structure]

or a pharmaceutically acceptable salt thereof.

[0415] In some embodiments, the first nucleotide from the 5′ end of the sense strand includes a structure of

[chemical structure]

or a pharmaceutically acceptable salt thereof. In some embodiments, the first nucleotide from the 5′ end of the sense strand includes a structure of

[chemical structure]

or a pharmaceutically acceptable salt thereof.

[0416] In some embodiments, the first nucleotide from the 3′ end of the sense strand includes a structure of

[chemical structure]

or a pharmaceutically acceptable salt thereof. In some embodiments, the first nucleotide from the 3′ end of the sense strand includes a structure of

[chemical structure]

or a pharmaceutically acceptable salt thereof and [symbol] is an attachment point to a ligand. In some embodiments, the first nucleotide from the 3′ end of the sense strand includes a structure of

[chemical structure]

or a pharmaceutically acceptable salt thereof.

[0417] In certain aspects, at least one of the TNAs in the sense strand as described herein has a structure of

[chemical structure]

or a pharmaceutically acceptable salt thereof, wherein [symbol] is an attachment point to a terminal group (e.g., H, OH, or salt) or the adjacent nucleotides. In some embodiments, at least one of the TNAs in the sense strand as described herein has a structure of

[chemical structure]

or a pharmaceutically acceptable salt thereof.

[0418] In some embodiments, the first nucleotide from the 5′ end of the sense strand includes a structure of

[chemical structure]

or a pharmaceutically acceptable salt thereof. In some embodiments, the first nucleotide from the 5′ end of the sense strand includes a structure of

[chemical structure]

or a pharmaceutically acceptable salt thereof.

[0419] In some embodiments, the first nucleotide from the 3′ end of the sense strand includes a structure of

[chemical structure]

or a pharmaceutically acceptable salt thereof. In some embodiments, the first nucleotide from the 3′ end of the sense strand includes a structure of

[chemical structure]

[chemical structure]

or a pharmaceutically acceptable salt thereof and [symbol] is an attachment point to a ligand. In some embodiments, the first nucleotide from the 3′ end of the sense strand includes a structure of

[chemical structure]

or a pharmaceutically acceptable salt thereof.

[0420] In certain aspects, at least one of the TNAs in the sense strand as described herein has a structure of

[chemical structure]

or a pharmaceutically acceptable salt thereof, wherein [symbol] is an attachment point to a terminal group (e.g., H, OH, or salt) or the adjacent nucleotides. In some embodiments, at least one of the TNAs in the sense strand as described herein has a structure of

[chemical structure]

or a pharmaceutically acceptable salt thereof.

[0421] In some embodiments, the first nucleotide from the 5′ end of the sense strand includes a structure of

[chemical structure]

or a pharmaceutically acceptable salt thereof. In some embodiments, the first nucleotide from the 5′ end of the sense strand includes a structure of

[chemical structure]

or a pharmaceutically acceptable salt thereof.

[0422] In some embodiments, the first nucleotide from the 3′ end of the sense strand includes a structure of

[chemical structure]

or a pharmaceutically acceptable salt thereof. In some embodiments, the first nucleotide from the 3′ end of the sense strand includes a structure of

[chemical structure]

or a pharmaceutically acceptable salt thereof and [symbol] is an attachment point to a ligand. In some embodiments, the first nucleotide from the 3′ end of the sense strand includes a structure of

[chemical structure]

or a pharmaceutically acceptable salt thereof.

[0423] In certain aspects, the TNAs locate at both 5′ and 3′ ends of a sense strand so as to form a structural confinement (“TNA clamp”) at the sense strand termini. In some embodiments, the TNA clamps may be symmetric and having the same number of TNAs at both 5′ and 3′ ends of the sense strand. For example, the sense strand includes one TNA at 5′ end and one TNA at 3′ end; two TNAs at 5′ end and two TNAs at 3′ end; or three TNAs at 5′ end and three TNAs at 3′ end. In some embodiments, the TNA clamps may be asymmetric and having different numbers of TNAs at 5′ and 3′ ends of the sense strand. For example, the sense strand includes one TNA at 5′ end only; one TNA at 3′ end only; two TNAs at 5′ end only; two TNAs at 3′ end only; one TNA at 5′ end and two TNAs at 3′ end; or two TNAs at 5′ end and one TNA at 3′ end.

[0424] In certain aspects, the sense strand includes one TNA at 5′ end and one TNA at 3′ end. In some embodiments, the sense strand includes only one TNA at 5′ end and only one TNA at 3′ end. In some embodiments, the sense strand includes only one TNA at 5′ end. In some embodiments, the sense strand includes only one TNA at 3′ end.

[0425] In certain aspects, the sense strand includes at least two contiguous TNAs at 5′ end and at least two TNAs at 3′ end. In some embodiments, the sense strand includes only two TNAs at 5′ end and only two TNAs at 3′ end. In some embodiments, the sense strand includes only two TNAs at 5′ end. In some embodiments, the sense strand includes only two TNAs at 3′ end.

[0426] In certain aspects, the sense strand includes one or two contiguous 2′-TNA modified nucleotides at 5′ end and/or one or two contiguous 2′-TNA modified nucleotides at 3′ end, where the sense strand comprises a nucleotide sequence selected from SEQ ID NOs: 761-776. In some embodiments, the nucleotide sequence of the sense strand comprises SEQ ID NO: 761. In some embodiments, the nucleotide sequence of the sense strand comprises SEQ ID NO: 762. In some embodiments, the nucleotide sequence of the sense strand comprises SEQ ID NO: 763. In some embodiments, the nucleotide sequence of the sense strand comprises SEQ ID NO: 764. In some embodiments, the nucleotide sequence of the sense strand comprises SEQ ID NO: 765. In some embodiments, the nucleotide sequence of the sense strand comprises SEQ ID NO: 766. In some embodiments, the nucleotide sequence of the sense strand comprises SEQ ID NO: 767. In some embodiments, the nucleotide sequence of the sense strand comprises SEQ ID NO: 768. In some embodiments, the nucleotide sequence of the sense strand comprises SEQ ID NO: 769. In some embodiments, the nucleotide sequence of the sense strand comprises SEQ ID NO: 770. In some embodiments, the nucleotide sequence of the sense strand comprises SEQ ID NO: 771. In some embodiments, the nucleotide sequence of the sense strand comprises SEQ ID NO: 772. In some embodiments, the nucleotide sequence of the sense strand comprises SEQ ID NO: 773. In some embodiments, the nucleotide sequence of the sense strand comprises SEQ ID NO: 774. In some embodiments, the nucleotide sequence of the sense strand comprises SEQ ID NO: 775. In some embodiments, the nucleotide sequence of the sense strand comprises SEQ ID NO: 776.

[0427] In certain aspects, the sense strand is 21 nucleotides in length. In some embodiments, the sense strand includes one, two, three, or four TNAs positioned at the 1st, 2nd, 20th, and/or 21st nucleotides from the 5′ end of the sense strand. In some embodiments, the sense strand includes two TNAs positioned at the 1st, 2nd, 20th, or 21st nucleotides from the 5′ end of the sense strand. In some embodiments, the sense strand includes three TNAs positioned at the 1st, 2nd, 20th, or 21st nucleotides from the 5′ end of the sense strand. In some embodiments, the sense strand includes TNAs positioned at the 1st, 2nd, 20th, and 21st nucleotides from the 5′ end of the sense strand. In some embodiments, the sense strand does not include a TNA at the 3rd to 19th nucleotides from 5′ end of the sense strands.

[0428] In certain aspects, the sense strand of the dsRNA as described herein includes two or more 2′-F modifications. In some embodiments, the sense strand of the dsRNA includes two, three, four, five, six, seven, or eight 2′-F modified nucleotides. In some embodiments, the sense strand includes two 2′-F modified nucleotides. In some embodiments, the sense strand includes three 2′-F modified nucleotides. In some embodiments, the sense strand includes four 2′-F modified nucleotides. In some embodiments, the sense strand includes five 2′-F modified nucleotides. In some embodiments, the sense strand includes six 2′-F modified nucleotides. In some embodiments, the sense strand includes seven 2′-F modified nucleotides. In some embodiments, the sense strand includes eight 2′-F modified nucleotides. In some embodiments, two contiguous 2′-F modified nucleotides locate in the sense strand. In some embodiments, three contiguous 2′-F modified nucleotides locate in the sense strand. In some embodiments, four contiguous 2′-F modified nucleotides locate in the sense strand.

[0429] In certain aspects, the sense strand is 21 nucleotides in length. In some embodiments, 2′-F modified nucleotides locate at 5th, 7th, 8th, and/or 9th positions from the 5′ end of the sense strand. In some embodiments, 2′-F modified nucleotides locate at 6th, 8th, 9th, and/or 10th positions from the 5′ end of the sense strand. In some embodiments, 2′-F modified nucleotides locate at 7th, 9th, 10th, and/or 11th positions from the 5′ end of the sense strand. In some embodiments, 2′-F modified nucleotides locate at 8th, 10th, 11th, and/or 12th positions from the 5′ end of the sense strand. In some embodiments, 2′-F modified nucleotides locate at 9th, 11th, 12th, and/or 13th positions from the 5′ end of the sense strand.

[0430] In certain aspects, a sense strand of the dsRNA as described herein includes one, two, three, or four 2′-deoxy modifications (DNA). In some embodiments, the sense strand of the dsRNA includes one 2′-deoxy modified nucleotide. In some embodiments, the sense strand includes two 2′-deoxy modified nucleotides. In some embodiments, the sense strand includes three 2′-deoxy modified nucleotides. In some embodiments, the sense strand includes four 2′-deoxy modified nucleotides.

[0431] In certain aspects, a sense strand of the dsRNA as described herein includes one, two, three, or four deoxythymidines (dT). In some embodiments, the sense strand of the dsRNA includes one deoxythymidine (dT). In some embodiments, the sense strand includes two deoxythymidines. In some embodiments, the sense strand includes three deoxythymidines (dT). In some embodiments, the sense strand includes four deoxythymidines.

[0432] In some embodiments, the sense strand is 21 nucleotides in length. In some embodiments, one or more 2′-deoxy modified nucleotides locate at 5th, 7th, 8th, and/or 9th positions from the 5′ end of the sense strand. In some embodiments, one or more 2′-deoxy modified nucleotides locate at 6th, 8th, 9th, and/or 10th positions from the 5′ end of the sense strand. In some embodiments, one or more 2′-deoxy modified nucleotides locate at 7th, 9th, 10th, and/or 11th positions from the 5′ end of the sense strand. In some embodiments, one or more 2′-deoxy modified nucleotides locate at 8th, 10th, 11th, and/or 12th positions from the 5′ end of the sense strand. In some embodiments, one or more 2′-deoxy modified nucleotides locate at 9th, 11th, 12th, and/or 13th positions from the 5′ end of the sense strand.

[0433] In some embodiments, the sense strand is 21 nucleotides in length and one 2′-deoxy modified nucleotide locates at 7th position from the 5′ end of the sense strand. In some embodiments, the sense strand is 21 nucleotides in length and one 2′-deoxy modified nucleotide locates at 8th position from the 5′ end of the sense strand. In some embodiments, the sense strand is 21 nucleotides in length and one 2′-deoxy modified nucleotide locates at 9th position from the 5′ end of the sense strand. In some embodiments, the sense strand is 21 nucleotides in length and one 2′-deoxy modified nucleotide locates at 10th position from the 5′ end of the sense strand. In some embodiments, the sense strand is 21 nucleotides in length and one 2′-deoxy modified nucleotide locates at 11th position from the 5′ end of the sense strand. In some embodiments, the sense strand is 21 nucleotides in length and one 2′-deoxy modified nucleotide locates at 12th position from the 5′ end of the sense strand. In some embodiments, the sense strand is 21 nucleotides in length and one 2′-deoxy modified nucleotide locates at 13th position from the 5′ end of the sense strand. In some embodiments, the sense strand is 21 nucleotides in length and one 2′-deoxy modified nucleotide locates at 14th position from the 5′ end of the sense strand.

[0434] In some embodiments, the sense strand is 21 nucleotides in length and one deoxythymidine (dT) locates at 7th position from the 5′ end of the sense strand. In some embodiments, the sense strand is 21 nucleotides in length and one deoxythymidine (dT) locates at 8th position from the 5′ end of the sense strand. In some embodiments, the sense strand is 21 nucleotides in length and one deoxythymidine (dT) locates at 9th position from the 5′ end of the sense strand. In some embodiments, the sense strand is 21 nucleotides in length and one deoxythymidine (dT) locates at 10th position from the 5′ end of the sense strand. In some embodiments, the sense strand is 21 nucleotides in length and one deoxythymidine (dT) locates at 11th position from the 5′ end of the sense strand. In some embodiments, the sense strand is 21 nucleotides in length and one deoxythymidine (dT) locates at 12th position from the 5′ end of the sense strand. In some embodiments, the sense strand is 21 nucleotides in length and one deoxythymidine (dT) locates at 13th position from the 5′ end of the sense strand. In some embodiments, the sense strand is 21 nucleotides in length and one deoxythymidine (dT) locates at 14th position from the 5′ end of the sense strand.

[0435] In some embodiments, when the sense strand is 21 nucleotides in length, 2′-F modified nucleotides locate at 5th, 7th, and 8th from the 5′ end of the sense strand and one deoxythymidine (dT) locates at 9th position from the 5′ end of the sense strand. In some embodiments, when the sense strand is 21 nucleotides in length, 2′-F modified nucleotides locate at 6th, 8th, and 9th from the 5′ end of the sense strand and one deoxythymidine (dT) locates at 10th position from the 5′ end of the sense strand. In some embodiments, when the sense strand is 21 nucleotides in length, 2′-F modified nucleotides locate at 7th, 9th, and 10th from the 5′ end of the sense strand and one deoxythymidine (dT) locates at 11th position from the 5′ end of the sense strand. In some embodiments, when the sense strand is 21 nucleotides in length, 2′-F modified nucleotides locate at 8th, 10th, and 11th from the 5′ end of the sense strand and one deoxythymidine (dT) locates at 12th position from the 5′ end of the sense strand. In some embodiments, when the sense strand is 21 nucleotides in length, 2′-F modified nucleotides locate at 9th, 11th, and 12th from the 5′ end of the sense strand and one deoxythymidine (dT) locates at 13th position from the 5′ end of the sense strand.

[0436] In some embodiments, the sense strand includes 2′-OMe modified nucleotides in the remaining positions in the sense strand.

[0437] In certain aspects, the sense strand includes one to six phosphorothioate (PS) linkages between nucleosides. In some embodiments, the sense strand includes one, two, three, or four phosphorothioate (PS) linkages between nucleosides.

[0438] In certain aspects, the sense strand is 21 nucleotides in length. In some embodiments, the sense strand includes two 3′-PS modified nucleotides at the 1st, 2nd, 19th and/or 20th positions from 5′ end of the sense strand. In some embodiments, the sense strand includes three 3′-PS modified nucleotides at the 1st, 2nd, 19th and/or 20th positions from 5′ end of the sense strand. In some embodiments, the sense strand includes 3′-PS modified nucleotides at the 1st, 2nd, 19th and 20th positions from 5′ end of the sense strand.

[0439] In certain aspects, the sense strand is 21 nucleotides in length. In some embodiments, the sense strand includes 3′-PS modified nucleotides at the 1st and 2nd positions from 5′ end of the sense strand. In some embodiments, the sense strand includes a 3′-PS modified nucleotide at the 19th and 20th position from 5′ end of the sense strand. In some embodiments, the sense strand includes 3′-PS modified nucleotides at the 1st and 20th positions from 5′ end of the sense strand. In some embodiments, the sense strand includes 3′-PS modified nucleotides at the 1st, 2nd, 19th and 20th positions from 5′ end of the sense strand.

[0440] In certain aspects, the sense strand includes two to eight phosphorothioate (PS) groups or linkages between nucleosides. In certain aspects, the sense strand is 21 nucleotides in length. In some embodiments, the sense strand includes two 3′-PS modified nucleotides positioned at the 1st, 2nd, 3rd, 4th, 17th, 18th, 19th and/or 20th nucleotides from 5′ end of the sense strand. In some embodiments, the sense strand includes four 3′-PS modified nucleotides positioned at the 1st, 2nd, 3rd, 4th, 17th, 18th, 19th and/or 20th nucleotides from 5′ end of the sense strand. In some embodiments, the sense strand includes six 3′-PS modified nucleotides positioned at the 1st, 2nd, 3rd, 4th, 17th, 18th, 19th and/or 20th nucleotides from 5′ end of the sense strand. In some embodiments, the sense strand includes 3′-PS modified nucleotides positioned at the 1st, 2nd, 3rd, 4th, 17th, 18th, 19th and 20th nucleotides from 5′ end of the sense strand.

[0441] In certain aspects, the sense strand is 21 nucleotides in length. In some embodiments, at least one of the 3′-PS groups at the 1st, 2nd, 3rd, 4th, 17th, 18th, 19th and/or 20th nucleotides from 5′ end of the sense strand is a stereopure Rp isomer. In some embodiments, at least one of the 3′-PS groups at the 1st, 2nd, 19th and/or 20th nucleotides from 5′ end of the sense strand is a stereopure Rp isomer. In some embodiments, at least one of the 3′-PS groups at the 1st and/or 20th nucleotides from 5′ end of the sense strand is a stereopure Rp isomer. In some embodiments, the 3′-PS group at the 1st nucleotide from 5′ end of the sense strand is a stereopure Rp isomer. In some embodiments, the 3′-PS group at the 2nd nucleotide from 5′ end of the sense strand is a stereopure Rp isomer. In some embodiments, the 3′-PS group at the 19th nucleotide from 5′ end of the sense strand is a stereopure Rp isomer. In some embodiments, the 3′-PS group at the 20th nucleotide from 5′ end of the sense strand is a stereopure Rp isomer. In some embodiments, the 3′-PS groups at the 1st and 20th nucleotides from 5′ end of the sense strand are stereopure Rp isomers. In some embodiments, the 3′-PS groups at the 1st, 2nd, 19^{th} and 20th nucleotides from 5′ end of the sense strand are stereopure Rp isomers.

[0442] In certain aspects, the sense strand is 21 nucleotides in length. In some embodiments, at least one of the 3′-PS groups at the 1st, 2nd, 3rd, 4th, 17th, 18th, 19th and/or 20th nucleotides from 5′ end of the sense strand is a stereopure Sp isomer. In some embodiments, at least one of the 3′-PS groups at the 1st, 2nd, 19th and/or 20th nucleotides from 5′ end of the sense strand is a stereopure Sp isomer. In some embodiments, at least one of the 3′-PS groups at the 1st and/or 20th nucleotides from 5′ end of the sense strand is a stereopure Sp isomer. In some embodiments, the 3′-PS group at the 1st nucleotide from 5′ end of the sense strand is a stereopure Sp isomer. In some embodiments, the 3′-PS group at the 2nd nucleotide from 5′ end of the sense strand is a stereopure Sp isomer. In some embodiments, the 3′-PS group at the 19th nucleotide from 5′ end of the sense strand is a stereopure Sp isomer. In some embodiments, the 3′-PS group at the 20nd nucleotide from 5′ end of the sense strand is a stereopure Sp isomer. In some embodiments, the 3′-PS groups at the 1st and 20th nucleotides from 5′ end of the sense strand are stereopure Sp isomers. In some embodiments, the 3′-PS groups at the 1st, 2nd, 19th, and 20th nucleotides from 5′ end of the sense strand are stereopure Sp isomers.

[0443] In certain aspects, a sense strand of the dsRNA as described herein includes one or more TNAs, one or more 2′-F modified nucleotides, one or more 2′-deoxy modified nucleotides, and one or more 2′-OMe modified nucleotides. In certain aspects, a sense strand of the dsRNA as described herein consists of one or more TNAs, one or more 2′-F modified nucleotides, one or more 2′-deoxy modified nucleotides, and one or more 2′-OMe modified nucleotides.

[0444] In certain aspects, a sense strand of the dsRNA as described herein may have a Formula (I)

(I)
5′-X₁-X₂-X₃-X₄-X₅-X₆-X₇-X₈-X₉-X₁₀-X₁₁-X₁₂-X₁₃-
X₁₄-X₁₅-X₁₆-X₁₇-X₁₈-X₁₉-X₂₀-X₂₁-3′

[0445] wherein:
[0446] each X₁, X₂, X₂₀, and X₂₁ is independently a 2′-MOE modified nucleotide;
[0447] each X₃ to X₁₉ is independently selected from a 2′-deoxy modified nucleotide, 2′-MOE modified nucleotide, 2′-F modified nucleotide, and 2′-OMe modified nucleotide.

[0448] In some embodiments, the nucleotide sequence of the sense strand of Formula (I) comprises a sequence selected from the SEQ ID NOs: 761-776. In some embodiments, the nucleotide sequence of the sense strand of Formula (I) comprises a sequence SEQ ID NO: 761. In some embodiments, the nucleotide sequence of the sense strand of Formula (I) comprises a sequence SEQ ID NO: 762. In some embodiments, the nucleotide sequence of the sense strand of Formula (I) comprises a sequence SEQ ID NO: 763. In some embodiments, the nucleotide sequence of the sense strand of Formula (I) comprises a sequence SEQ ID NO: 764. In some embodiments, the nucleotide sequence of the sense strand of Formula (I) comprises a sequence SEQ ID NO: 765. In some embodiments, the nucleotide sequence of the sense strand of Formula (I) comprises a sequence SEQ ID NO: 766. In some embodiments, the nucleotide sequence of the sense strand of Formula (I) comprises a sequence SEQ ID NO: 767. In some embodiments, the nucleotide sequence of the sense strand of Formula (I) comprises a sequence SEQ ID NO: 768. In some embodiments, the nucleotide sequence of the sense strand of Formula (I) comprises a sequence SEQ ID NO: 769. In some embodiments, the nucleotide sequence of the sense strand of Formula (I) comprises a sequence SEQ ID NO: 770. In some embodiments, the nucleotide sequence of the sense strand of Formula (I) comprises a sequence SEQ ID NO: 771. In some embodiments, the nucleotide sequence of the sense strand of Formula (I) comprises a sequence SEQ ID NO: 772. In some embodiments, the nucleotide sequence of the sense strand of Formula (I) comprises a sequence SEQ ID NO: 773. In some embodiments, the nucleotide sequence of the sense strand of Formula (I) comprises a sequence SEQ ID NO: 774. In some embodiments, the nucleotide sequence of the sense strand of Formula (I) comprises a sequence SEQ ID NO: 775. In some embodiments, the nucleotide sequence of the sense strand of Formula (I) comprises a sequence SEQ ID NO: 776.

[0449] In some embodiments, the first nucleotide from the 5′ end of the sense strand (X₁) of Formula (I) is a 2′-MOE modified nucleotide with a nucleobase T. In some embodiments, the first nucleotide from the 5′ end of the sense strand (X₁) is a 2′-MOE modified nucleotide with a nucleobase methylated cytosine (e.g., 5-methylcytosine or N⁴-methylcytosine). In some embodiments, the second nucleotide from the 5′ end of the sense strand (X₂) is a 2′-MOE modified nucleotide with a nucleobase A, T, G or methylated cytosine (e.g., 5-methylcytosine or N⁴-methylcytosine). In some embodiments, the second nucleotide from the 5′ end of the sense strand (X₂) is a 2′-MOE modified nucleotide with a nucleobase T. In some embodiments, the second nucleotide from the 5′ end of the sense strand (X₂) is a 2′-MOE modified nucleotide with a nucleobase G. In some embodiments, the second nucleotide from the 5′ end of the sense strand (X₂) is a 2′-MOE modified nucleotide with a nucleobase A. In some embodiments, the second nucleotide from the 5′ end of the sense strand (X₂) is a 2′-MOE modified nucleotide with a nucleobase methylated cytosine (e.g., 5-methylcytosine or N⁴-methylcytosine).

[0450] In some embodiments, the first nucleotide from the 3′ end of the sense strand (X₂₁) is a 2′-MOE modified nucleotide with a nucleobase A or T. In some embodiments, the first nucleotide from the 3′ end of the sense strand (X₂₁) is a 2′-MOE modified nucleotide with a nucleobase A. In some embodiments, the first nucleotide from the 3′ end of the sense strand (X₂₁) is a 2′-MOE modified nucleotide with a nucleobase T. In some embodiments, the second nucleotide from the 3′ end of the sense strand (X₂₀) is a 2′-MOE modified nucleotide with a nucleobase A. In some embodiments, the second nucleotide from the 3′ end of the sense strand (X₂₀) is a 2′-MOE modified nucleotide with a nucleobase G. In some embodiments, the second nucleotide from the 3′ end of the sense strand (X₂₀) is a 2′-MOE modified nucleotide with a nucleobase T. In some embodiments, the second nucleotide from the 3′ end of the sense strand (X₂₀) is a 2′-MOE modified nucleotide with a nucleobase methylated cytosine (e.g., 5-methylcytosine or N⁴-methylcytosine).

[0451] In certain aspects, in Formula (I), X₃ to X₁₉ do not include a 2′-MOE modified nucleotide. In certain aspects, X₃ to X₁₉ do not include a TNA. In some embodiments, each X₃ to X₁₉ is selected from deoxyribonucleotide, 2′-F modified nucleotides and 2′-OMe modified nucleotides. In some embodiments, at least one of X₃ to X₁₉ is not a deoxyribonucleotide.

[0452] In some embodiments, each X_{f}, X_{f+2}, and X_{f+3} is 2′-F modified nucleotide and X_{f+4} is 2′-deoxy modified nucleotide when f is an integer from 3 to 17. In some embodiments, f is 5. In some embodiments, f is 6. In some embodiments, f is 7. In some embodiments, f is 8. In some embodiments, f is 9. In some embodiments, X₅, X₇, and X₈ are 2′-F modified nucleotides, and X₉ is 2′-deoxy modified nucleotide (e.g., dT). In some embodiments, X₆, X₈, and X₉ are 2′-F modified nucleotides and X₁₀ is 2′-deoxy modified nucleotide (e.g., dT). In some embodiments, X₇, X₉, and X₁₀ are 2′-F modified nucleotides, and X₁₁ is 2′-deoxy modified nucleotide (e.g., dT). In some embodiments, X₈, X₁₀, and X₁₁ are 2′-F modified nucleotides, and X₁₂ is 2′-deoxy modified nucleotide (e.g., dT). In some embodiments, X₉, X₁₁, and X₁₂ are 2′-F modified nucleotides, and X₁₃ is 2′-deoxy modified nucleotide (e.g., dT).

[0453] In some embodiments, the sense strand includes 2′-OMe modified nucleotides in the remaining positions in the sense strand.

[0454] In some embodiments, at least two nucleotides from X₁, X₂, X₁₉, and X₂₀ contain a 3′-PS group, respectively. In some embodiments, two nucleotides from X₁, X₂, X₁₉, and X₂₀ contain a 3′-PS group, respectively. In some embodiments, three nucleotides from X₁, X₂, X₁₉, and X₂₀ contain a 3′-PS group, respectively. In some embodiments, each X₁, X₂, X₁₉, and X₂₀ contains a 3′-PS group. In some embodiments, each X₁ and X₂ contains a 3′-PS group.

[0455] In some embodiments, at least four from X₁, X₂, X₃, X₄, X₁₇, X₁₈, X₁₉, and/or X₂₀ contain 3′-PS groups. In some embodiments, four from X₁, X₂, X₃, X₄, X₁₇, X₁₈, X₁₉, and/or X₂₀ contain a 3′-PS group, respectively. In some embodiments, six from X₁, X₂, X₃, X₄, X₁₇, X₁₈, X₁₉, and/or X₂₀ contain a 3′-PS group, respectively. In some embodiments, X₁, X₂, X₃, X₄, X₁₇, X₁₈, X₁₉, and X₂₀ contain a 3′-PS group, respectively.

[0456] In some embodiments, in X₃ to X₁₈, two to six nucleotides contain 3′-PS groups. In some embodiments, in X₃ to X₁₈, two nucleotides contain a 3′-PS group, respectively, respectively. In some embodiments, in X₃ to X₁₈, three nucleotides contain a 3′-PS group, respectively. In some embodiments, in X₃ to X₁₈, four nucleotides contain a 3′-PS group, respectively. In some embodiments, in X₃ to X₁₈, five nucleotides contain a 3′-PS group, respectively. In some embodiments, in X₃ to X₁₈, six nucleotides contain a 3′-PS group, respectively.

[0457] In certain aspects, the sense strand includes 2′-MOE modified nucleotides positioned at the 1st, 2nd, 20th, and 21st nucleotides from the 5′ end of the sense strand.

[0458] In some embodiments, the sense strand having 21 nucleotides in length includes:
[0459] (i) 2′-MOE modifications at the 1st, 2nd, 20th and/or 21st nucleotides from the 5′ end of the sense strand; and
[0460] (ii) 3′-PS modifications at the 1st, 2nd, 19th, and/or 20th nucleotides from 5′ end of the sense strand.

[0461] In some embodiments, the sense strand having 21 nucleotides in length includes:
[0462] (i) 2′-MOE modifications at the 1st, 2nd, 20th and/or 21st nucleotides from the 5′ end of the sense strand; 2′-F modifications at 7th, 9th, and 10th nucleotides from the 5′ end of the sense strand; 2′-deoxy modification at 11th nucleotide; and 2′-OMe modifications in the remaining nucleotides.

[0463] In some embodiments, the sense strand having 21 nucleotides in length includes:
[0464] (i) 2′-MOE modifications at the 1st, 2nd, 20th and/or 21st nucleotides from the 5′ end of the sense strand; 2′-F modifications at 7th, 9th, and 10th nucleotides from the 5′ end of the sense strand; and 2′-deoxy modification at 11th nucleotide; and
[0465] (ii) 3′-PS modifications at the 1st and 2nd nucleotides from 5′ end of the sense strand.

[0466] In some embodiments, the sense strand having 21 nucleotides in length includes:
[0467] (i) 2′-MOE modifications at the 1st, 2nd, 20th and/or 21st nucleotides from the 5′ end of the sense strand; 2′-F modifications at 7th, 9th, and 10th nucleotides from the 5′ end of the sense strand; and 2′-deoxy modification at 11th nucleotide; and
[0468] (ii) 3′-PS modifications at the 1st, 2nd, 19th, and 20th nucleotides from 5′ end of the sense strand.

[0469] In some embodiments, the sense strand having 21 nucleotides in length includes:
[0470] (i) 2′-MOE modifications at the 1st, 2nd, 20th and/or 21st nucleotides from the 5′ end of the sense strand; 2′-F modifications at 7th, 9, and 10th nucleotides from the 5′ end of the sense strand; 2′-deoxy modification at 11th nucleotide; and 2′-OMe modifications in the remaining nucleotides; and
[0471] (ii) 3′-PS modifications at the 1st and 2nd nucleotides from 5′ end of the sense strand.

[0472] In some embodiments, the sense strand having 21 nucleotides in length includes:
[0473] (i) 2′-MOE modifications at the 1st, 2nd, 20th and/or 21st nucleotides from the 5′ end of the sense strand; 2′-F modifications at 7th, 9, and 10th nucleotides from the 5′ end of the sense strand; 2′-deoxy modification at 11th nucleotide; and 2′-OMe modifications in the remaining nucleotides; and
[0474] (ii) 3′-PS modifications at the 1st, 2nd, 19th, and 20th nucleotides from 5′ end of the sense strand.

[0475] In some embodiments, the sense strand having 21 nucleotides in length includes:
[0476] (i) 2′-MOE modifications at the 1st, 2nd, 20th and 21st nucleotides from the 5′ end of the sense strand; 2′-F modifications at 7th, 9, and 10th nucleotides from the 5′ end of the sense strand; 2′-deoxy modification at 11th nucleotide; and 2′-OMe modifications in the remaining nucleotides; and
[0477] (ii) 3′-PS modifications at the 1st and 2nd nucleotides from 5′ end of the sense strand.

[0478] In some embodiments, the sense strand having 21 nucleotides in length includes:
[0479] (i) 2′-MOE modifications at the 1st, 2nd, 20th and 21st nucleotides from the 5′ end of the sense strand; 2′-F modifications at 7th, 9, and 10th nucleotides from the 5′ end of the sense strand; 2′-deoxy modification at 11th nucleotide; and 2′-OMe modifications in the remaining nucleotides; and
[0480] (ii) 3′-PS modifications at the 1st, 2nd, 19th, and 20th nucleotides from 5′ end of the sense strand.

[0481] In certain aspects, a sense strand of the dsRNA as described herein may have a Formula (I′),

(I′)
5′-X₁-X₂-X₃-X₄-X₅-X₆-X₇-X₈-X₉-X₁₀-X₁₁-X₁₂-X₁₃-
X₁₄-X₁₅-X₁₆-X₁₇-X₁₈-X₁₉-X₂₀-X₂₁-3′

[0482] wherein:
[0483] each X₁, X₂, X₂₀, and X₂₁ is independently a TNA; and
[0484] each X₃ to X₁₉ is independently selected from 2′-deoxy modified nucleotide, 2′-MOE modified nucleotide, 2′-F modified nucleotide, and 2′-OMe modified nucleotide.

[0485] In some embodiments, the nucleotide sequence of the sense strand of Formula (I′) comprises a sequence selected from the SEQ ID NOs: 761-776 of Table 2. In some embodiments, the nucleotide sequence of the sense strand of Formula (I′) comprises a sequence SEQ ID NO: 761. In some embodiments, the nucleotide sequence of the sense strand of Formula (I′) comprises a sequence SEQ ID NO: 762. In some embodiments, the nucleotide sequence of the sense strand of Formula (I′) comprises a sequence SEQ ID NO: 763. In some embodiments, the nucleotide sequence of the sense strand of Formula (I′) comprises a sequence SEQ ID NO: 764. In some embodiments, the nucleotide sequence of the sense strand of Formula (I′) comprises a sequence SEQ ID NO: 765. In some embodiments, the nucleotide sequence of the sense strand of Formula (I′) comprises a sequence SEQ ID NO: 766. In some embodiments, the nucleotide sequence of the sense strand of Formula (I′) comprises a sequence SEQ ID NO: 767. In some embodiments, the nucleotide sequence of the sense strand of Formula (I′) comprises a sequence SEQ ID NO: 768. In some embodiments, the nucleotide sequence of the sense strand of Formula (I′) comprises a sequence SEQ ID NO: 769. In some embodiments, the nucleotide sequence of the sense strand of Formula (I′) comprises a sequence SEQ ID NO: 770. In some embodiments, the nucleotide sequence of the sense strand of Formula (I′) comprises a sequence SEQ ID NO: 771. In some embodiments, the nucleotide sequence of the sense strand of Formula (I′) comprises a sequence SEQ ID NO: 772. In some embodiments, the nucleotide sequence of the sense strand of Formula (I′) comprises a sequence SEQ ID NO: 773. In some embodiments, the nucleotide sequence of the sense strand of Formula (I′) comprises a sequence SEQ ID NO: 774. In some embodiments, the nucleotide sequence of the sense strand of Formula (I′) comprises a sequence SEQ ID NO: 775. In some embodiments, the nucleotide sequence of the sense strand of Formula (I′) comprises a sequence SEQ ID NO: 776.

[0486] In certain aspects, in Formula (I′), X₃ to X₁₉ do not include a 2′-MOE modified nucleotide. In some embodiments, each X₃ to X₁₉ is selected from deoxyribonucleotide, 2′-F modified nucleotides and 2′-OMe modified nucleotides. In some embodiments, at least one of X₃ to X₁₉ is not a deoxyribonucleotide.

[0487] In some embodiments, each X_{f}, X_{f+2}, and X_{f+3} is 2′-F modified nucleotide and X_{f+4} is 2′-deoxy modified nucleotide when f is an integer from 3 to 17. In some embodiments, f is 5. In some embodiments, f is 6. In some embodiments, f is 7. In some embodiments, f is 8. In some embodiments, f is 9. In some embodiments, X₅, X₇, and X₈ are 2′-F modified nucleotides, and X₉ is 2′-deoxy modified nucleotide (e.g., dT). In some embodiments, X₆, X₈, and X₉ are 2′-F modified nucleotides and X₁₀ is 2′-deoxy modified nucleotide (e.g., dT). In some embodiments, X₇, X₉, and X₁₀ are 2′-F modified nucleotides, and X₁₁ is 2′-deoxy modified nucleotide (e.g., dT). In some embodiments, X₈, X₁₀, and X₁₁ are 2′-F modified nucleotides, and X₁₂ is 2′-deoxy modified nucleotide (e.g., dT). In some embodiments, X₉, X₁₁, and X₁₂ are 2′-F modified nucleotides, and X₁₃ is 2′-deoxy modified nucleotide (e.g., dT).

[0488] In some embodiments, the sense strand includes 2′-OMe modified nucleotides in the remaining positions in the sense strand.

[0489] In some embodiments, at least two nucleotides from X₁, X₂, X₁₉, and X₂₀ contain a 3′-PS group, respectively. In some embodiments, two from X₁, X₂, X₁₉, and X₂₀ contains 3′-PS group. In some embodiments, three nucleotides from X₁, X₂, X₁₉, and X₂₀ contain a 3′-PS group, respectively. In some embodiments, each X₁, X₂, X₁₉, and X₂₀ contains a 3′-PS group. In some embodiments, each X₁ and X₂ contains a 3′-PS group.

[0490] In some embodiments, at least four from X₁, X₂, X₃, X₄, X₁₇, X₁₈, X₁₉, and/or X₂₀ contain 3′-PS groups. In some embodiments, four from X₁, X₂, X₃, X₄, X₁₇, X₁₈, X₁₉, and/or X₂₀ contain a 3′-PS group, respectively. In some embodiments, six from X₁, X₂, X₃, X₄, X₁₇, X₁₈, X₁₉, and/or X₂₀ contain a 3′-PS group, respectively. In some embodiments, X₁, X₂, X₃, X₄, X₁₇, X₁₈, X₁₉, and X₂₀ contain a 3′-PS group, respectively.

[0491] In some embodiments, in X₃ to X₁₈, two to six nucleotides contain 3′-PS groups. In some embodiments, in X₃ to X₁₈, two nucleotides contain a 3′-PS group, respectively. In some embodiments, in X₃ to X₁₈, three nucleotides contain a 3′-PS group, respectively. In some embodiments, in X₃ to X₁₈, four nucleotides contain a 3′-PS group, respectively. In some embodiments, in X₃ to X₁₈, five nucleotides contain a 3′-PS group, respectively. In some embodiments, in X₃ to X₁₈, six nucleotides contain a 3′-PS group, respectively.

[0492] In certain aspects, the sense strand includes TNAs positioned at the 1st, 2nd, 20th, and 21st nucleotides from the 5′ end of the sense strand.

[0493] In some embodiments, the sense strand having 21 nucleotides in length includes:
[0494] (i) TNAs at the 1st, 2nd, 20th and/or 21st nucleotides from the 5′ end of the sense strand; and
[0495] (ii) 3′-PS modifications at the 1st, 2nd, 19th, and/or 20th nucleotides from 5′ end of the sense strand.

[0496] In some embodiments, the sense strand having 21 nucleotides in length includes:
[0497] (i) TNAs at the 1st, 2nd, 20th and/or 21st nucleotides from the 5′ end of the sense strand; 2′-F modifications at 7th, 9th, and 10th nucleotides from the 5′ end of the sense strand; 2′-deoxy modification at 11th nucleotide; and 2′-OMe modifications in the remaining nucleotides.

[0498] In some embodiments, the sense strand having 21 nucleotides in length includes:
[0499] (i) TNAs at the 1st, 2nd, 20th and/or 21st nucleotides from the 5′ end of the sense strand; 2′-F modifications at 7th, 9th, and 10th nucleotides from the 5′ end of the sense strand; and 2′-deoxy modification at 11th nucleotide; and
[0500] (ii) 3′-PS modifications at the 1st and 2nd nucleotides from 5′ end of the sense strand.

[0501] In some embodiments, the sense strand having 21 nucleotides in length includes:
[0502] (i) TNAs at the 1st, 2nd, 20th and/or 21st nucleotides from the 5′ end of the sense strand; 2′-F modifications at 7th, 9th, and 10th nucleotides from the 5′ end of the sense strand; and 2′-deoxy modification at 11th nucleotide; and
[0503] (ii) 3′-PS modifications at the 1st, 2nd, 19th, and 20th nucleotides from 5′ end of the sense strand.

[0504] In some embodiments, the sense strand having 21 nucleotides in length includes:
[0505] (i) TNAs at the 1st, 2nd, 20th and/or 21st nucleotides from the 5′ end of the sense strand; 2′-F modifications at 7th, 9th, and 10th nucleotides from the 5′ end of the sense strand; 2′-deoxy modification at 11th nucleotide; and 2′-OMe modifications in the remaining nucleotides; and
[0506] (ii) 3′-PS modifications at the 1st and 2nd nucleotides from 5′ end of the sense strand.

[0507] In some embodiments, the sense strand having 21 nucleotides in length includes:
[0508] (i) TNAs at the 1st, 2nd, 20th and/or 21st nucleotides from the 5′ end of the sense strand; 2′-F modifications at 7th, 9th, and 10th nucleotides from the 5′ end of the sense strand; 2′-deoxy modification at 11th nucleotide; and 2′-OMe modifications in the remaining nucleotides; and
[0509] (ii) 3′-PS modifications at the 1st, 2nd, 19th, and 20th nucleotides from 5′ end of the sense strand.

[0510] In some embodiments, the sense strand having 21 nucleotides in length includes:
[0511] (i) TNAs at the 1st, 2nd, 20th and 21st nucleotides from the 5′ end of the sense strand; 2′-F modifications at 7th, 9th, and 10th nucleotides from the 5′ end of the sense strand; 2′-deoxy modification at 11th nucleotide; and 2′-OMe modifications in the remaining nucleotides; and
[0512] (ii) 3′-PS modifications at the 1st and 2nd nucleotides from 5′ end of the sense strand.

[0513] In some embodiments, the sense strand having 21 nucleotides in length includes:
[0514] (i) TNAs at the 1st, 2nd, 20th and 21st nucleotides from the 5′ end of the sense strand; 2′-F modifications at 7th, 9th, and 10th nucleotides from the 5′ end of the sense strand; 2′-deoxy modification at 11th nucleotide; and 2′-OMe modifications in the remaining nucleotides; and
[0515] (ii) 3′-PS modifications at the 1st, 2nd, 19th, and 20th nucleotides from 5′ end of the sense strand.

[0516] Exemplary modification patterns of sense strands are shown in Table 3.

TABLE 3

| | 2′-MOE | | 2′F | 2′-deoxy | 2′-OMe | |
|---|---|---|---|---|---|---|
| 21-mer SS | modified | | modified | modified | modified | |
| modification | nucleotide | TNA | nucleotide | nucleotide | nucleotide | 3′-PS |
| pattern No. | position | position | position | position | position | linkage |
| SS1 | | | 7, 9, 10, 11 | | 1, 2, 3, 4, | 1, 2 |
| | | | | | 5, 6, 8, 12, | |
| | | | | | 13, 14, 15, | |
| | | | | | 16, 17, 18, | |
| | | | | | 19, 20, 21 | |
| SS2 | 1, 2, 20, 21 | | 7, 9, 10, 11 | | 3, 4, 5, 6, | 1, 2 |
| | | | | | 8, 12, 13, | |
| | | | | | 14, 15, 16, | |
| | | | | | 17, 18, 19 | |
| SS3 | 1, 2, 20, 21 | | 7, 9, 10 | 11 | 3, 4, 5, 6, | 1, 2 |
| | | | | | 8, 12, 13, | |
| | | | | | 14, 15, 16, | |
| | | | | | 17, 18, 19 | |
| SS4 | 1, 2, 20, 21 | | 7, 9, 10, 11 | | 3, 4, 5, 6, | 1, 2, 19, 20 |
| | | | | | 8, 12, 13, | |
| | | | | | 14, 15, 16, | |
| | | | | | 17, 18, 19 | |
| SS5 | 1, 2, 20, 21 | | 7, 9, 10 | 11 | 3, 4, 5, 6, | 1, 2, 19, 20 |
| | | | | | 8, 12, 13, | |
| | | | | | 14, 15, 16, | |
| | | | | | 17, 18, 19 | |
| SS6 | | 1, 2, 20, | 7, 9, 10, 11 | | 3, 4, 5, 6, | 1, 2 |
| | | 21 | | | 8, 12, 13, | |
| | | | | | 14, 15, 16, | |
| | | | | | 17, 18, 19 | |
| SS7 | | 1, 2, 20, | 7, 9, 10 | 11 | 3, 4, 5, 6, | 1, 2 |
| | | 21 | | | 8, 12, 13, | |
| | | | | | 14, 15, 16, | |
| | | | | | 17, 18, 19 | |
| SS8 | | 1, 2, 20, | 7, 9, 10, 11 | | 3, 4, 5, 6, | 1, 2, 19, 20 |
| | | 21 | | | 8, 12, 13, | |
| | | | | | 14, 15, 16, | |
| | | | | | 17, 18, 19 | |
| SS9 | | 1, 2, 20, | 7, 9, 10 | 11 | 3, 4, 5, 6, | 1, 2, 19, 20 |
| | | 21 | | | 8, 12, 13, | |
| | | | | | 14, 15, 16, | |
| | | | | | 17, 18, 19 | |
| SS10 | 1, 2, 20, 21 | None | At least | At least one | At least | 1, 2, 19, |
| | | | one among | among the | one among | and/or 20 |
| | | | the | remaining | the | |
| | | | remaining | positions | remaining | |
| | | | positions | | positions | |
| SS11 | None | 1, 2, 20, | At least | At least one | At least | 1, 2, 19, |
| | | 21 | one among | among the | one among | and/or 20 |
| | | | the | remaining | the | |
| | | | remaining | positions | remaining | |
| | | | positions | | positions | |

[0517] In some embodiments, the sense strand having 21 nucleotides in length has the modification pattern of SS1. In some embodiments, the sense strand having 21 nucleotides in length has the modification pattern of SS2. In some embodiments, the sense strand having 21 nucleotides in length has the modification pattern of SS3. In some embodiments, the sense strand having 21 nucleotides in length has the modification pattern of SS4. In some embodiments, the sense strand having 21 nucleotides in length has the modification pattern of SS5. In some embodiments, the sense strand having 21 nucleotides in length has the modification pattern of SS6. In some embodiments, the sense strand having 21 nucleotides in length has the modification pattern of SS7. In some embodiments, the sense strand having 21 nucleotides in length has the modification pattern of SS8. In some embodiments, the sense strand having 21 nucleotides in length has the modification pattern of SS9. In some embodiments, the sense strand having 21 nucleotides in length has the modification pattern of SS10. In some embodiments, the sense strand having 21 nucleotides in length has the modification pattern of SS11. In some embodiments, the sense strand has a modification pattern of SS1, SS2, SS3, SS4, SS5, SS6, SS7, SS8, SS9, SS10, or SS11, and comprises a nucleotide sequence selected from SEQ ID NOs: 761-776. In some embodiments, the sense strand has a modification pattern of SS1, SS2, SS3, SS4, SS5, SS6, SS7, SS8, SS9, SS10, or SS11, and comprises SEQ ID NO: 761. In some embodiments, the sense strand has a modification pattern of SS1, SS2, SS3, SS4, SS5, SS6, SS7, SS8, SS9, SS10, or SS11, and comprises SEQ ID NO: 762. In some embodiments, the sense strand has a modification pattern of SS1, SS2, SS3, SS4, SS5, SS6, SS7, SS8, SS9, SS10, or SS11, and comprises SEQ ID NO: 763. In some embodiments, the sense strand has a modification pattern of SS1, SS2, SS3, SS4, SS5, SS6, SS7, SS8, SS9, SS10, or SS11, and comprises SEQ ID NO: 764. In some embodiments, the sense strand has a modification pattern of SS1, SS2, SS3, SS4, SS5, SS6, SS7, SS8, SS9, SS10, or SS11, and comprises SEQ ID NO: 765. In some embodiments, the sense strand has a modification pattern of SS1, SS2, SS3, SS4, SS5, SS6, SS7, SS8, SS9, SS10, or SS11, and comprises SEQ ID NO: 766. In some embodiments, the nucleotide sequence of the sense strand comprises SEQ ID NO: 767. In some embodiments, the sense strand has a modification pattern of SS1, SS2, SS3, SS4, SS5, SS6, SS7, SS8, SS9, SS10, or SS11, and comprises SEQ ID NO: 768. In some embodiments, the sense strand has a modification pattern of SS1, SS2, SS3, SS4, SS5, SS6, SS7, SS8, SS9, SS10, or SS11, and comprises SEQ ID NO: 769. In some embodiments, the sense strand has a modification pattern of SS1, SS2, SS3, SS4, SS5, SS6, SS7, SS8, SS9, SS10, or SS11, and comprises SEQ ID NO: 770. In some embodiments, the sense strand has a modification pattern of SS1, SS2, SS3, SS4, SS5, SS6, SS7, SS8, SS9, SS10, or SS11, and comprises SEQ ID NO: 771. In some embodiments, the sense strand has a modification pattern of SS1, SS2, SS3, SS4, SS5, SS6, SS7, SS8, SS9, SS10, or SS11, and comprises SEQ ID NO: 772. In some embodiments, the sense strand has a modification pattern of SS1, SS2, SS3, SS4, SS5, SS6, SS7, SS8, SS9, SS10, or SS11, and comprises SEQ ID NO: 773. In some embodiments, the sense strand has a modification pattern of SS1, SS2, SS3, SS4, SS5, SS6, SS7, SS8, SS9, SS10, or SS11, and comprises SEQ ID NO: 774. In some embodiments, the sense strand has a modification pattern of SS1, SS2, SS3, SS4, SS5, SS6, SS7, SS8, SS9, SS10, or SS11, and comprises SEQ ID NO: 775. In some embodiments, the sense strand has a modification pattern of SS1, SS2, SS3, SS4, SS5, SS6, SS7, SS8, SS9, SS10, or SS11, and comprises SEQ ID NO: 776. In some embodiments, the sense strand has a modification pattern of SS1 and comprises SEQ ID No: 761. In some embodiments, the sense strand has a modification pattern of SS2 and comprises SEQ ID No: 761. In some embodiments, the sense strand has a modification pattern of SS3 and comprises SEQ ID No: 761. In some embodiments, the sense strand has a modification pattern of SS4 and comprises SEQ ID No: 761. In some embodiments, the sense strand has a modification pattern of SS5 and comprises SEQ ID No: 761. In some embodiments, the sense strand has a modification pattern of SS6 and comprises SEQ ID No: 761. In some embodiments, the sense strand has a modification pattern of SS7 and comprises SEQ ID No: 761. In some embodiments, the sense strand has a modification pattern of SS8 and comprises SEQ ID No: 761. In some embodiments, the sense strand has a modification pattern of SS9 and comprises SEQ ID No: 761. In some embodiments, the sense strand has a modification pattern of SS10 and comprises SEQ ID No: 761. In some embodiments, the sense strand has a modification pattern of SS11 and comprises SEQ ID No: 761.

### Antisense Strand (AS)

[0518] In certain aspects, an antisense strand of the dsRNA as described herein are substantially (e.g., greater than about 80%, 85%, 90%, or 95% of the total nucleotides) made of modified nucleotides. In another certain aspect, the antisense strand is entirely made of modified nucleotides.

[0519] In certain aspects, the first nucleotide from the 5′ end of the antisense strand may contain an additional phosphate group or a variant thereof (e.g., phosphorothioate, phosphorodithioate, methylphosphonate, methylene phosphonate, or vinyl phosphonate (VP)) attached or linked to the 5′ terminal group of the first nucleotide) attached or linked to the 5′ terminal group of the first nucleotide.

[0520] In certain aspects, the antisense strand includes 5′-vinyl phosphonate (5′-VP) group at the first nucleotide from the 5′ end in the antisense strand. The “5′-VP” is a chemical moiety having the structure of

[chemical structure]

or a pharmaceutically acceptable salt thereof, where the wavy line represent the point of attachment to the 5′ carbon of the pentofuranosyl sugar of a nucleotide.

[0521] In some embodiments, the first nucleotide from the 5′ end in the antisense strand includes (E)-vinyl phosphonate (VP) having a structure of

[chemical structure]

or a pharmaceutically acceptable salt thereof, wherein the wavy line presents the point of attachment to the 4′ carbon of the pentofuranosyl sugar of a nucleotide. In some embodiments, the first nucleotide from the 5′ end in the antisense strand includes (Z)-vinyl phosphonate having a structure of

[chemical structure]

or a pharmaceutically acceptable salt thereof, wherein the wavy line presents the point of attachment to the 4′ carbon of the pentofuranosyl sugar of a nucleotide.

[0522] In some embodiments, the first nucleotide from the 5′ end of the antisense strand has a structure of

[chemical structure]

or a pharmaceutically acceptable salt thereof. In some embodiments, the first nucleotide from the 5′ end of the antisense strand has a structure of

[chemical structure]

or a pharmaceutically acceptable salt thereof. In some embodiments, the first nucleotide from the 5′ end of the antisense strand has a structure of

[chemical structure]

or a pharmaceutically acceptable salt thereof. In some embodiments, the first nucleotide from the 5′ end of the antisense strand has a structure of

[chemical structure]

or a pharmaceutically acceptable salt thereof.

[0523] In some embodiments, the first nucleotide from the 5′ end of the antisense strand has a structure of

[chemical structure]

or a pharmaceutically acceptable salt thereof, wherein [symbol] is an attachment point to the adjacent nucleotides. In some embodiments, the first nucleotide from the 5′ end of the antisense strand has a structure of

[chemical structure]

or a pharmaceutically acceptable salt thereof. In some embodiments, the first nucleotide from the 5′ end of the antisense strand has a structure of

[chemical structure]

or a pharmaceutically acceptable salt thereof, wherein [symbol] is an attachment point to the adjacent nucleotides. In some embodiments, the first nucleotide from the 5′ end of the antisense strand has a structure of

[chemical structure]

or a pharmaceutically acceptable salt thereof.

[0524] In certain aspects, the antisense strand of the dsRNA as described herein includes two or more 2′-F modifications. In some embodiments, the antisense strand of the dsRNA includes two, three, four, five, six, seven, or eight 2′-F modified nucleotides. In some embodiments, the antisense strand includes two 2′-F modified nucleotides. In some embodiments, the antisense strand includes three 2′-F modified nucleotides. In some embodiments, the antisense strand includes four 2′-F modified nucleotides. In some embodiments, the antisense strand includes five 2′-F modified nucleotides. In some embodiments, the antisense strand includes six 2′-F modified nucleotides. In some embodiments, the antisense strand includes seven 2′-F modified nucleotides. In some embodiments, the antisense strand includes eight 2′-F modified nucleotides. In some embodiments, two contiguous 2′-F modified nucleotides locate in the antisense strand. In some embodiments, three contiguous 2′-F modified nucleotides locate in the antisense strand. In some embodiments, four contiguous 2′-F modified nucleotides locate in the antisense strand.

[0525] In certain aspects, the antisense strand is 23 nucleotides in length. In some embodiments, the antisense includes comprises two, three, or four 2′-F modifications positioned at the 2nd, 6th, 14th, and/or 16th nucleotide from 5′ end of the antisense strand. In some embodiments, the antisense includes two 2′-F modifications positioned at the 2nd, 6th, 14th, and/or 16th nucleotide from 5′ end of the antisense strand. In some embodiments, the antisense includes three 2′-F modifications positioned at the 2nd, 6th, 14th, and/or 16th nucleotide from 5′ end of the antisense strand. In some embodiments, the antisense includes 2′-F modifications positioned at the 2nd, 6th, 14th, and 16th nucleotide from 5′ end of the antisense strand.

[0526] In certain aspects, an antisense strand of the dsRNA as described herein does not include a 2′-MOE modification. Alternatively, in certain aspects, the antisense strand includes one to four 2′-MOE modified nucleotides. In some embodiments, the antisense strand includes one 2′-MOE modified nucleotide. In some embodiments, the antisense strand includes two 2′-MOE modified nucleotides. In some embodiments, the antisense strand includes three 2′-MOE modified nucleotides. In some embodiments, the antisense strand includes four 2′-MOE modified nucleotides.

[0527] In certain aspects, the antisense strand includes at least one GNA. In some embodiments, the antisense strand includes only one GNA.

[0528] In certain aspects, the antisense strand is 23 nucleotides in length. In some embodiments, the antisense strand includes only one GNA at the 4th nucleotide from 5′ end of the antisense strand. In some embodiments, the antisense strand includes only one GNA at the 5th nucleotide from 5′ end of the antisense strand. In some embodiments, the antisense strand includes only one GNA at the 6th nucleotide from 5′ end of the antisense strand. In some embodiments, the antisense strand includes only one GNA at the 7th nucleotide from 5′ end of the antisense strand.

[0529] In certain aspects, the antisense strand includes at least one TNA. In some embodiments, the antisense strand includes only one TNA.

[0530] In certain aspects, the antisense strand is 23 nucleotides in length. In some embodiments, the antisense strand includes only one TNA at the 3rd nucleotide from 5′ end of the antisense strand. In some embodiments, the antisense strand includes only one TNA at the 4th nucleotide from 5′ end of the antisense strand. In some embodiments, the antisense strand includes only one TNA at the 5th nucleotide from 5′ end of the antisense strand. In some embodiments, the antisense strand includes only one TNA at the 6th nucleotide from 5′ end of the antisense strand. In some embodiments, the antisense strand includes only one TNA at the 7th nucleotide from 5′ end of the antisense strand. In some embodiments, the antisense strand includes only one TNA at the 8th nucleotide from 5′ end of the antisense strand. In some embodiments, the antisense strand includes one or two TNA at the position 3, 5, 6, and/or 7 from 5′ end of the antisense strand, where the antisense strand has a nucleotide sequence of any one selected from SEQ ID NOs: 777-792. In some embodiments, the antisense strand includes one or two TNA at the position 3, 5, 6, and/or 7 from 5′ end of the antisense strand, where the antisense strand has a nucleotide sequence of SEQ ID NO:777. In some embodiments, the antisense strand includes one TNA at the position 3, 5, 6, or 7 from 5′ end of the antisense strand, where the antisense strand has a nucleotide sequence of any one selected from SEQ ID NOs: 777-792. In some embodiments, the antisense strand includes one TNA at the position 3, 5, 6, or 7 from 5′ end of the antisense strand, where the antisense strand has a nucleotide sequence of SEQ ID NO: 777. In some embodiments, the antisense strand includes two TNA at the position 3, and 5, 6, or 7 from 5′ end of the antisense strand, where the antisense strand has a nucleotide sequence of any one selected from SEQ ID NOs: 777-792. In some embodiments, the antisense strand includes two TNA at the position 3, and 5, 6, or 7 from 5′ end of the antisense strand, where the antisense strand has a nucleotide sequence of SEQ ID NO: 777.

[0531] In certain aspects, the antisense strand includes at least one 2′-deoxy modified nucleotide (e.g., dT, dA, dG, or dC). In some embodiments, the antisense strand includes only one 2′-deoxy modified nucleotide (e.g., dT, dA, dG, or dC).

[0532] In certain aspects, the antisense strand is 23 nucleotides in length. In some embodiments, the antisense strand includes only one 2′-deoxy modified nucleotide (e.g., dT, dA, dG, or dC) at the 3rd nucleotide from 5′ end of the antisense strand. In some embodiments, the antisense strand includes only one 2′-deoxy modified nucleotide (e.g., dT, dA, dG, or dC) at the 4th nucleotide from 5′ end of the antisense strand. In some embodiments, the antisense strand includes only one 2′-deoxy modified nucleotide (e.g., dT, dA, dG, or dC) at the 5th nucleotide from 5′ end of the antisense strand. In some embodiments, the antisense strand includes only one 2′-deoxy modified nucleotide (e.g., dT, dA, dG, or dC) at the 6th nucleotide from 5′ end of the antisense strand. In some embodiments, the antisense strand includes only one 2′-deoxy modified nucleotide (e.g., dT, dA, dG, or dC) at the 7th nucleotide from 5′ end of the antisense strand. In some embodiments, the antisense strand includes only one 2′-deoxy modified nucleotide (e.g., dT, dA, dG, or dC) at the 8th nucleotide from 5′ end of the antisense strand.

[0533] In certain aspects, the antisense strand includes two, three, or four phosphorothioate (PS) linkages between nucleosides. In certain aspects, the antisense strand is 23 nucleotides in length. In some embodiments, the antisense strand includes two 3′-PS modifications positioned at the 1st, 2nd, 21st, and/or 22nd nucleotides from 5′ end of the antisense strand. In some embodiments, the antisense strand includes three 3′-PS modifications positioned at the 1st, 2nd, 21st, and/or 22nd nucleotides from 5′ end of the antisense strand. In some embodiments, the antisense strand includes 3′-PS modifications positioned at the 1st, 2nd, 21st, and 22nd nucleotides from 5′ end of the antisense strand.

[0534] In certain aspects, the antisense strand includes two to eight phosphorothioate (PS) linkages between nucleosides.

[0535] In certain aspects, the antisense strand is 23 nucleotides in length. In some embodiments, the antisense strand includes two 3′-PS modified nucleotides positioned at the 1st, 2nd, 3rd, 4th, 19th, 20th, 21st, and/or 22nd nucleotides from 5′ end of the antisense strand. In some embodiments, the antisense strand includes four 3′-PS modified nucleotides positioned at the 1st, 2nd, 3rd, 4th, 19th, 20th, 21st, and/or 22nd nucleotides from 5′ end of the antisense strand. In some embodiments, the antisense strand includes six 3′-PS modified nucleotides positioned at the 1st, 2nd, 3rd, 4th, 19th, 20th, 21st, and/or 22nd nucleotides from 5′ end of the antisense strand. In some embodiments, the antisense strand includes 3′-PS modified nucleotides positioned at the 1st, 2nd, 3rd, 4th, 19th, 20th, 21st, and 22nd nucleotides from 5′ end of the antisense strand.

[0536] In certain aspects, the antisense strand is 23 nucleotides in length. In some embodiments, at least one of the PS groups at the 1st, 2nd, 3rd, 4th, 19th, 20th, 21st, and/or 22nd nucleotides from 5′ end of the antisense strand is a stereopure Rp isomer. In some embodiments, at least one of the PS groups at the 1st, 2nd, 21st, and/or 22nd nucleotides from 5′ end of the antisense strand is a stereopure Rp isomer. In some embodiments, at least one of the PS groups at the 1st and/or 22nd nucleotides from 5′ end of the antisense strand is a stereopure Rp isomer. In some embodiments, the PS group at the 1st nucleotide from 5′ end of the antisense strand is a stereopure Rp isomer. In some embodiments, the PS group at the 22nd nucleotide from 5′ end of the antisense strand is a stereopure Rp isomer. In some embodiments, the PS groups at the 1st and 22nd nucleotides from 5′ end of the antisense strand are stereopure Rp isomers.

[0537] In certain aspects, the antisense strand is 23 nucleotides in length. In some embodiments, at least one of the PS groups at the 1st, 2nd, 3rd, 4th, 19th, 20th, 21st, and/or 22nd nucleotides from 5′ end of the antisense strand is a stereopure Sp isomer. In some embodiments, at least one of the PS groups at the 1st, 2nd, 21st, and/or 22nd nucleotides from 5′ end of the antisense strand is a stereopure Sp isomer. In some embodiments, at least one of the PS groups at the 1st and/or 22nd nucleotides from 5′ end of the antisense strand is a stereopure Sp isomer. In some embodiments, the PS group at the 1st nucleotide from 5′ end of the antisense strand is a stereopure Sp isomer. In some embodiments, the PS group at the 22nd nucleotide from 5′ end of the antisense strand is a stereopure Sp isomer. In some embodiments, the PS groups at the 1st and 22nd nucleotides from 5′ end of the antisense strand are stereopure Sp isomers.

[0538] In certain aspects, the antisense strand is 23 nucleotides in length. In some embodiments, at least one of the PS groups at the 1st, 2nd, 3rd, 4th, 19th, 20th, 21st, and/or 22nd nucleotides from 5′ end of the antisense strand is stereopure Sp isomer

[0539] In certain aspects, an antisense strand of dsRNA may have a Formula (II):

(II)
5′-X_{1′}-X_{2′}-X_{3′}-X_{4′}-X_{5′}-X_{6′}-X_{7′}-X_{8′}-X_{9′}-X_{10′}-X_{11′}-
X_{12′}-X_{13′}-X_{14′}-X_{15′}-X_{16′}-X_{17′}-X_{18′}-X_{19′}-X_{20′}-X_{21′}-
X_{22′}-X_{23′}-3′

wherein:
[0540] each X_{1′} to X_{23′} is independently selected from a 2′-deoxy modified nucleotide, 2′-F modified nucleotide, 2′-OMe modified nucleotide, 2′-MOE modified nucleotide, TNA, and GNA; and
[0541] X_{1′} further includes a 5′-(E)-vinyl phosphonate group.

[0542] In some embodiments, the nucleotide sequence of the antisense strand of Formula (II) is selected from SEQ ID NOs: 777-792. In some embodiments, the nucleotide sequence of the antisense strand of Formula (II) comprises SEQ ID NO: 777. In some embodiments, the nucleotide sequence of the antisense strand of Formula (II) comprises SEQ ID NO: 778. In some embodiments, the nucleotide sequence of the antisense strand of Formula (II) comprises SEQ ID NO: 779. In some embodiments, the nucleotide sequence of the antisense strand of Formula (II) comprises SEQ ID NO: 780. In some embodiments, the nucleotide sequence of the antisense strand of Formula (II) comprises SEQ ID NO: 781. In some embodiments, the nucleotide sequence of the antisense strand of Formula (II) comprises SEQ ID NO: 782. In some embodiments, the nucleotide sequence of the antisense strand of Formula (II) comprises SEQ ID NO: 783. In some embodiments, the nucleotide sequence of the antisense strand of Formula (II) comprises SEQ ID NO: 784. In some embodiments, the nucleotide sequence of the antisense strand of Formula (II) comprises SEQ ID NO: 785. In some embodiments, the nucleotide sequence of the antisense strand of Formula (II) comprises SEQ ID NO: 786. In some embodiments, the nucleotide sequence of the antisense strand of Formula (II) comprises SEQ ID NO: 787. In some embodiments, the nucleotide sequence of the antisense strand of Formula (II) comprises SEQ ID NO: 788. In some embodiments, the nucleotide sequence of the antisense strand of Formula (II) comprises SEQ ID NO: 789. In some embodiments, the nucleotide sequence of the antisense strand of Formula (II) comprises SEQ ID NO: 790. In some embodiments, the nucleotide sequence of the antisense strand of Formula (II) comprises SEQ ID NO: 791. In some embodiments, the nucleotide sequence of the antisense strand of Formula (II) comprises SEQ ID NO: 792.

[0543] In certain aspects, in Formula (II), X_{1′} to X_{23′} do not include a 2′-MOE modified nucleotide. In some embodiments, each X_{1′} to X_{23′} is independently selected from 2′-F modified nucleotides and 2′-OMe modified nucleotides.

[0544] Alternatively, in certain aspects, in Formula (II), X_{1′} to X_{23′} include one to four 2′-MOE modified nucleotides. In some embodiments, one of X_{1′}, X_{9′}, X_{10′}, and X_{23′} may be 2′-MOE modified nucleotide. In some embodiments, two of X_{1′}, X_{9′}, X_{10′}, and X_{23′} may be 2′-MOE modified nucleotides. In some embodiments, three of X_{1′}, X_{9′}, X_{10′}, and X_{23′} may be 2′-MOE modified nucleotides. In some embodiments, X_{1′}, X_{9′}, X_{10′}, and X_{23′} may be 2′-MOE modified nucleotide.

[0545] In some embodiments, X_{2′} is a 2′-F modified nucleotide. In some embodiments, X_{6′} is a 2′-F modified nucleotide. In some embodiments, X_{14′} is a 2′-F modified nucleotide. In some embodiments, X_{16′} is a 2′-F modified nucleotide. In some embodiments, two of X_{2′}, X_{6′}, X_{14′} and X₁₆, are 2′-F modified nucleotides. In some embodiments, three of X_{2′}, X_{6′}, X_{14′} and X_{16′} are 2′-F modified nucleotides. In some embodiments, each X_{2′}, X_{6′}, X_{14′} and X_{16′} is a 2′-F modified nucleotide.

[0546] In some embodiments, X_{1′} to X_{23′} may include at least one GNA. In some embodiments, X_{1′} to X_{23′} may include only one GNA. In some embodiments, X_{3′} is a GNA. In some embodiments, X_{4′} is a GNA. In some embodiments, X_{5′} is a GNA. In some embodiments, X_{6′} is a GNA. In some embodiments, X_{7′} is a GNA.

[0547] In some embodiments, X_{1′} to X_{23′} may include at least one TNA. In some embodiments, X_{1′} to X_{23′} may include only one TNA. In some embodiments, X_{3′} is a TNA. In some embodiments, X_{4′} is a TNA. In some embodiments, X_{5′} is a TNA. In some embodiments, X_{6′} is a TNA. In some embodiments, X_{7′} is a TNA.

[0548] In some embodiments, X_{1′} to X_{23′} may include at least one 2′-deoxy modified nucleotide (e.g., dT, dA, dG, or dC). In some embodiments, X_{1′} to X_{23′} may include only one 2′-deoxy modified nucleotide (e.g., dT, dA, dG, or dC). In some embodiments, X_{3′} is a 2′-deoxy modified nucleotide (e.g., dT, dA, dG, or dC). In some embodiments, X_{4′} is a 2′-deoxy modified nucleotide (e.g., dT, dA, dG, or dC). In some embodiments, X_{5′} is a 2′-deoxy modified nucleotide (e.g., dT, dA, dG, or dC). In some embodiments, X_{6′} is a 2′-deoxy modified nucleotide (e.g., dT, dA, dG, or dC). In some embodiments, X_{7′} is a 2′-deoxy modified nucleotide (e.g., dT, dA, dG, or dC). In some embodiments, X_{1′} to X_{23′} may include only dT. In some embodiments, X_{3′} is dT. In some embodiments, X_{4′} is dT. In some embodiments, X_{5′} is dT. In some embodiments, X_{6′} is dT. In some embodiments, X_{7′} is dT.

[0549] In some embodiments, the antisense strand includes 2′-OMe modified nucleotides in the remaining positions in the antisense strand.

[0550] In some embodiments, at least two from X_{1′}, X_{2′}, X_{21′}, and X_{22′} contain 3′-PS groups. In some embodiments, two from X_{1′}, X_{2′}, X_{21′}, and X_{22′} contain a 3′-PS group, respectively. In some embodiments, three from X_{1′}, X_{2′}, X_{21′}, and X_{22′} contain a 3′-PS group. In some embodiments, each X_{1′}, X_{2′}, X_{21′}, and X_{22′} contains a 3′-PS group.

[0551] In some embodiments, at least four from X_{1′}, X_{2′}, X_{3′}, X_{4′}, X_{19′}, X_{20′}, X_{21′}, and X_{22′} contain 3′-PS groups. In some embodiments, four from X_{1′}, X_{2′}, X_{3′}, X_{4′}, X_{19′}, X_{20′}, X_{21′}, and X_{22′} contain a 3′-PS group, respectively. In some embodiments, six from X_{1′}, X_{2′}, X_{3′}, X_{4′}, X_{19′}, X_{20′}, X_{21′}, and X_{22′} contain a 3′-PS group, respectively. In some embodiments, X_{1′}, X_{2′}, X_{3′}, X_{4′}, X_{19′}, X_{20′}, X_{21′}, and X_{22′} contain a 3′-PS group, respectively.

[0552] In some embodiments, in X_{3′} to X_{20′}, two to six nucleotides contain 3′-PS groups. In some embodiments, in X_{3′} to X_{20′}, two nucleotides contain a 3′-PS group, respectively. In some embodiments, in X_{3′} to X_{20′}, three nucleotides contain a 3′-PS group, respectively. In some embodiments, in X_{3′} to X_{20′}, four nucleotides contain a 3′-PS group, respectively. In some embodiments, in X_{3′} to X_{20′}, five nucleotides contain a 3′-PS group, respectively. In some embodiments, in X_{3′} to X_{20′}, six nucleotides contain a 3′-PS group, respectively.

[0553] In certain aspects, the antisense strand includes 5′-(E)-VP modified nucleotide at the first nucleotide from 5′ end of the antisense strand. In some embodiments, the antisense strand includes a 5′-(E)-VP-2′-OMe modified nucleotide at the first nucleotide from 5′ end of the antisense strand.

[0554] In some embodiments, the antisense strand having 23 nucleotides in length includes:
[0555] (i) a 5′-(E)-VP-2′-OMe modification at the first nucleotide from 5′ end of the antisense strand; and
[0556] (ii) 3′-PS modifications at the 1st, 2nd, 21st, and/or 22nd nucleotides from 5′ end of the antisense strand.

[0557] In some embodiments, the antisense strand having 23 nucleotides in length includes:
[0558] (i) a 5′-(E)-VP-2′-OMe modification at the first nucleotide from 5′ end of the antisense strand;
[0559] (ii) 2′-F modifications at 2nd, 6th, 14th, and/or 16th nucleotides from the 5′ end of the antisense strand; and 2′-OMe modifications in the remaining nucleotides; and
[0560] (iii) 3′-PS modifications at the 1st, 2nd, 21st, and/or 22nd nucleotides from 5′ end of the antisense strand.

[0561] In some embodiments, the antisense strand having 23 nucleotides in length includes:
[0562] (i) a 5′-(E)-VP-2′-OMe modification at the first nucleotide from 5′ end of the antisense strand;
[0563] (ii) 2′-F modifications at 2nd, 6th, 14th, and/or 16th nucleotides from the 5′ end of the antisense strand; GNA at 5th nucleotide from the 5′ end of the antisense strand; and 2′-OMe modifications in the remaining nucleotides; and
[0564] (iii) 3′-PS modifications at the 1st, 2nd, 21st, and/or 22nd nucleotides from 5′ end of the antisense strand.

[0565] In some embodiments, the antisense strand having 23 nucleotides in length includes:
[0566] (i) a 5′-(E)-VP-2′-OMe modification at the first nucleotide from 5′ end of the antisense strand;
[0567] (ii) 2′-F modifications at 2nd, 14th, and/or 16th nucleotides from the 5′ end of the antisense strand; GNA at 6th nucleotide from the 5′ end of the antisense strand; and 2′-OMe modifications in the remaining nucleotides; and
[0568] (iii) 3′-PS modifications at the 1st, 2nd, 21st, and/or 22nd nucleotides from 5′ end of the antisense strand.

[0569] In some embodiments, the antisense strand having 23 nucleotides in length includes:
[0570] (i) a 5′-(E)-VP-2′-OMe modification at the first nucleotide from 5′ end of the antisense strand;
[0571] (ii) 2′-F modifications at 2nd, 6th, 14th, and/or 16th nucleotides from the 5′ end of the antisense strand; GNA at 7th nucleotide from the 5′ end of the antisense strand; and 2′-OMe modifications in the remaining nucleotides; and
[0572] (iii) 3′-PS modifications at the 1st, 2nd, 21st, and/or 22nd nucleotides from 5′ end of the antisense strand.

[0573] In some embodiments, the antisense strand having 23 nucleotides in length includes:
[0574] (i) a 5′-(E)-VP-2′-OMe modification at the first nucleotide from 5′ end of the antisense strand;
[0575] (ii) 2′-F modifications at 2nd, 6th, 14th, and/or 16th nucleotides from the 5′ end of the antisense strand; TNA at 3rd nucleotide from the 5′ end of the antisense strand; and 2′-OMe modifications in the remaining nucleotides; and
[0576] (iii) 3′-PS modifications at the 1^{st}, 2^{nd}, 21^{st}, and/or 22^{nd} nucleotides from 5′ end of the antisense strand.

[0577] In some embodiments, the antisense strand having 23 nucleotides in length includes:
[0578] (i) a 5′-(E)-VP-2′-OMe modification at the first nucleotide from 5′ end of the antisense strand;
[0579] (ii) 2′-F modifications at 2nd, 6th, 14th, and/or 16th nucleotides from the 5′ end of the antisense strand; TNA at 5th nucleotide from the 5′ end of the antisense strand; and 2′-OMe modifications in the remaining nucleotides; and
[0580] (iii) 3′-PS modifications at the 1st, 2nd, 21st, and/or 22nd nucleotides from 5′ end of the antisense strand.

[0581] In some embodiments, the antisense strand having 23 nucleotides in length includes:
[0582] (i) a 5′-(E)-VP-2′-OMe modification at the first nucleotide from 5′ end of the antisense strand;
[0583] (ii) 2′-F modifications at 2nd, 14th, and/or 16th nucleotides from the 5′ end of the antisense strand; TNA at 6^{th} nucleotide from the 5′ end of the antisense strand; and 2′-OMe modifications in the remaining nucleotides; and
[0584] (iii) 3′-PS modifications at the 1st, 2nd, 21st, and/or 22nd nucleotides from 5′ end of the antisense strand.

[0585] In some embodiments, the antisense strand having 23 nucleotides in length includes:
[0586] (i) a 5′-(E)-VP-2′-OMe modification at the first nucleotide from 5′ end of the antisense strand;
[0587] (ii) 2′-F modifications at 2nd, 6th, 14th, and/or 16th nucleotides from the 5′ end of the antisense strand; TNA at 7th nucleotide from the 5′ end of the antisense strand; and 2′-OMe modifications in the remaining nucleotides; and
[0588] (iii) 3′-PS modifications at the 1st, 2nd, 21st, and/or 22nd nucleotides from 5′ end of the antisense strand.

[0589] In some embodiments, the antisense strand having 23 nucleotides in length includes:
[0590] (i) a 5′-(E)-VP-2′-OMe modification at the first nucleotide from 5′ end of the antisense strand;
[0591] (ii) 2′-F modifications at 2nd, 6th, 14th, and/or 16th nucleotides from the 5′ end of the antisense strand; a 2′-deoxy modification at 5th nucleotide from the 5′ end of the antisense strand; and 2′-OMe modifications in the remaining nucleotides; and
[0592] (iii) 3′-PS modifications at the 1st, 2nd, 21st, and/or 22nd nucleotides from 5′ end of the antisense strand.

[0593] In some embodiments, the antisense strand having 23 nucleotides in length includes:
[0594] (i) a 5′-(E)-VP-2′-OMe modification at the first nucleotide from 5′ end of the antisense strand;
[0595] (ii) 2′-F modifications at 2nd, 14th, and/or 16th nucleotides from the 5′ end of the antisense strand; a 2′-deoxy modification at 6^{th} nucleotide from the 5′ end of the antisense strand; and 2′-OMe modifications in the remaining nucleotides; and
[0596] (iii) 3′-PS modifications at the 1st, 2nd, 21st, and/or 22nd nucleotides from 5′ end of the antisense strand.

[0597] In some embodiments, the antisense strand having 23 nucleotides in length includes:
[0598] (i) a 5′-(E)-VP-2′-OMe modification at the first nucleotide from 5′ end of the antisense strand;
[0599] (ii) 2′-F modifications at 2nd, 6th, 14th, and/or 16th nucleotides from the 5′ end of the antisense strand; a 2′-deoxy modification at 7th nucleotide from the 5′ end of the antisense strand; and 2′-OMe modifications in the remaining nucleotides; and
[0600] (iii) 3′-PS modifications at the 1st, 2nd, 21st, and/or 22nd nucleotides from 5′ end of the antisense strand.

[0601] In some embodiments, the antisense strand having 23 nucleotides in length includes:
[0602] (i) a 5′-(E)-VP-2′-OMe modification at the first nucleotide from 5′ end of the antisense strand;
[0603] (ii) 2′-F modifications at 2nd, 6th, 14th, and/or 16th nucleotides from the 5′ end of the antisense strand; GNA at 3rd and 5th nucleotides from the 5′ end of the antisense strand; and 2′-OMe modifications in the remaining nucleotides; and
[0604] (iii) 3′-PS modifications at the 1st, 2nd, 21st, and/or 22nd nucleotides from 5′ end of the antisense strand.

[0605] In some embodiments, the antisense strand having 23 nucleotides in length includes:
[0606] (i) a 5′-(E)-VP-2′-OMe modification at the first nucleotide from 5′ end of the antisense strand;
[0607] (ii) 2′-F modifications at 2nd, 14th, and/or 16th nucleotides from the 5′ end of the antisense strand; GNA at 3rd and 6th nucleotides from the 5′ end of the antisense strand; and 2′-OMe modifications in the remaining nucleotides; and
[0608] (iii) 3′-PS modifications at the 1st, 2nd, 21st, and/or 22nd nucleotides from 5′ end of the antisense strand.

[0609] In some embodiments, the antisense strand having 23 nucleotides in length includes:
[0610] (i) a 5′-(E)-VP-2′-OMe modification at the first nucleotide from 5′ end of the antisense strand;
[0611] (ii) 2′-F modifications at 2nd, 6th, 14th, and/or 16th nucleotides from the 5′ end of the antisense strand; GNA at 3rd and 7th nucleotides from the 5′ end of the antisense strand; and 2′-OMe modifications in the remaining nucleotides; and
[0612] (iii) 3′-PS modifications at the 1st, 2nd, 21st, and/or 22nd nucleotides from 5′ end of the antisense strand.

[0613] In some embodiments, the antisense strand having 23 nucleotides in length includes:
[0614] (i) a 5′-(E)-VP-2′-OMe modification at the first nucleotide from 5′ end of the antisense strand;
[0615] (ii) 2′-F modifications at 2nd, 6th, 14th, and/or 16th nucleotides from the 5′ end of the antisense strand; TNA at 3rd and 5th nucleotides from the 5′ end of the antisense strand; and 2′-OMe modifications in the remaining nucleotides; and
[0616] (iii) 3′-PS modifications at the 1st, 2nd, 21st, and/or 22nd nucleotides from 5′ end of the antisense strand.

[0617] In some embodiments, the antisense strand having 23 nucleotides in length includes:
[0618] (i) a 5′-(E)-VP-2′-OMe modification at the first nucleotide from 5′ end of the antisense strand;
[0619] (ii) 2′-F modifications at 2nd, 14th, and/or 16th nucleotides from the 5′ end of the antisense strand; TNA at 3rd and 6th nucleotides from the 5′ end of the antisense strand; and 2′-OMe modifications in the remaining nucleotides; and
[0620] (iii) 3′-PS modifications at the 1st, 2nd, 21st, and/or 22nd nucleotides from 5′ end of the antisense strand.

[0621] In some embodiments, the antisense strand having 23 nucleotides in length includes:
[0622] (i) a 5′-(E)-VP-2′-OMe modification at the first nucleotide from 5′ end of the antisense strand;
[0623] (ii) 2′-F modifications at 2nd, 6th, 14th, and/or 16th nucleotides from the 5′ end of the antisense strand; TNA at 3rd and 7th nucleotides from the 5′ end of the antisense strand; and 2′-OMe modifications in the remaining nucleotides; and
[0624] (iii) 3′-PS modifications at the 1st, 2nd, 21st, and/or 22nd nucleotides from 5′ end of the antisense strand.

[0625] In some embodiments, the antisense strand having 23 nucleotides in length includes:
[0626] (i) a 5′-(E)-VP-2′-OMe modification at the first nucleotide from 5′ end of the antisense strand;
[0627] (ii) 2′-F modifications at 2nd, 6th, 14th, and/or 16th nucleotides from the 5′ end of the antisense strand; a 2′-deoxy modification at 3rd and 5th nucleotides from the 5′ end of the antisense strand; and 2′-OMe modifications in the remaining nucleotides; and
[0628] (iii) 3′-PS modifications at the 1st, 2nd, 21st, and/or 22nd nucleotides from 5′ end of the antisense strand.

[0629] In some embodiments, the antisense strand having 23 nucleotides in length includes:
[0630] (i) a 5′-(E)-VP-2′-OMe modification at the first nucleotide from 5′ end of the antisense strand;
[0631] (ii) 2′-F modifications at 2nd, 14th, and/or 16th nucleotides from the 5′ end of the antisense strand; a 2′-deoxy modification at 3rd and 6th nucleotide from the 5′ end of the antisense strand; and 2′-OMe modifications in the remaining nucleotides; and
[0632] (iii) 3′-PS modifications at the 1st, 2nd, 21st, and/or 22nd nucleotides from 5′ end of the antisense strand.

[0633] In some embodiments, the antisense strand having 23 nucleotides in length includes:
[0634] (i) a 5′-(E)-VP-2′-OMe modification at the first nucleotide from 5′ end of the antisense strand;
[0635] (ii) 2′-F modifications at 2nd, 6th, 14th, and/or 16th nucleotides from the 5′ end of the antisense strand; a 2′-deoxy modification at 3rd and 7th nucleotides from the 5′ end of the antisense strand; and 2′-OMe modifications in the remaining nucleotides; and
[0636] (iii) 3′-PS modifications at the 1 st, 2nd, 21 st, and/or 22nd nucleotides from 5′ end of the antisense strand.

[0637] Exemplary modification patterns of antisense strands are shown in Table 4.

TABLE 4

| | | | | | 2′- | | |
|---|---|---|---|---|---|---|---|
| | 5′-VP | | | | deoxy | 2′-OMe | |
| 23-mer AS | modified | 2′-F | | | modified | modified | |
| modification | nucleotide | modified | GNA | TNA | nucleotide | nucleotide | 3′-PS |
| pattern | position | nucleotide | position | position | position | position | linkage |
| AS1 | — | 2, 6, 14, 16 | | | | 1, 3, 4, 5, 7, | 1, 2, 21, |
| | | | | | | 8, 9, 10, 11, | 22 |
| | | | | | | 12, 13, 15, | |
| | | | | | | 17, 18, 19, | |
| | | | | | | 20, 21, 22, | |
| | | | | | | 23 | |
| AS2 | 1 | 2, 6, 14, 16 | | | | 1, 3, 4, 5, 7, | 1, 2, 21, |
| | | | | | | 8, 9, 10, 11, | 22 |
| | | | | | | 12, 13, 15, | |
| | | | | | | 17, 18, 19, | |
| | | | | | | 20, 21, 22, | |
| | | | | | | 23 | |
| AS3 | 1 | 2, 6, 14, 16 | 5 | | | 1, 3, 4, 7, 8, | 1, 2, 21, |
| | | | | | | 9, 10, 11, | 22 |
| | | | | | | 12, 13, 15, | |
| | | | | | | 17, 18, 19, | |
| | | | | | | 20, 21, 22, | |
| | | | | | | 23 | |
| AS4 | 1 | 2, 14, 16 | 6 | | | 1, 3, 4, 5, 7, | 1, 2, 21, |
| | | | | | | 8, 9, 10, 11, | 22 |
| | | | | | | 12, 13, 15, | |
| | | | | | | 17, 18, 19, | |
| | | | | | | 20, 21, 22, | |
| | | | | | | 23 | |
| AS5 | 1 | 2, 6, 14, 16 | 7 | | | 1, 3, 4, 5, 8, | 1, 2, 21, |
| | | | | | | 9, 10, 11, | 22 |
| | | | | | | 12, 13, 15, | |
| | | | | | | 17, 18, 19, | |
| | | | | | | 20, 21, 22, | |
| | | | | | | 23 | |
| AS6 | 1 | 2, 6, 14, 16 | | 3 | | 1, 4, 5, 7, 8, | 1, 2, 21, |
| | | | | | | 9, 10, 11, | 22 |
| | | | | | | 12, 13, 15, | |
| | | | | | | 17, 18, 19, | |
| | | | | | | 20, 21, 22, | |
| | | | | | | 23 | |
| AS7 | 1 | 2, 6, 14, 16 | | 5 | | 1, 3, 4, 7, 8, | 1, 2, 21, |
| | | | | | | 9, 10, 11, | 22 |
| | | | | | | 12, 13, 15, | |
| | | | | | | 17, 18, 19, | |
| | | | | | | 20, 21, 22, | |
| | | | | | | 23 | |
| AS8 | 1 | 2, 14, 16 | | 6 | | 1, 3, 4, 5, 7, | 1, 2, 21, |
| | | | | | | 8, 9, 10, 11, | 22 |
| | | | | | | 12, 13, 15, | |
| | | | | | | 17, 18, 19, | |
| | | | | | | 20, 21, 22, | |
| | | | | | | 23 | |
| AS9 | 1 | 2, 6, 14, 16 | | 7 | | 1, 3, 4, 5, 8, | 1, 2, 21, |
| | | | | | | 9, 10, 11, | 22 |
| | | | | | | 12, 13, 15, | |
| | | | | | | 17, 18, 19, | |
| | | | | | | 20, 21, 22, | |
| | | | | | | 23 | |
| AS10 | 1 | 2, 6, 14, 16 | | | 5 | 1, 3, 4, 7, 8, | 1, 2, 21, |
| | | | | | | 9, 10, 11, | 22 |
| | | | | | | 12, 13, 15, | |
| | | | | | | 17, 18, 19, | |
| | | | | | | 20, 21, 22, | |
| | | | | | | 23 | |
| AS11 | 1 | 2, 14, 16 | | | 6 | 1, 3, 4, 5, 7, | 1, 2, 21, |
| | | | | | | 8, 9, 10, 11, | 22 |
| | | | | | | 12, 13, 15, | |
| | | | | | | 17, 18, 19, | |
| | | | | | | 20, 21, 22, | |
| | | | | | | 23 | |
| AS12 | 1 | 2, 6, 14, 16 | | | 7 | 1, 3, 4, 5, 8, | 1, 2, 21, |
| | | | | | | 9, 10, 11, | 22 |
| | | | | | | 12, 13, 15, | |
| | | | | | | 17, 18, 19, | |
| | | | | | | 20, 21, 22, | |
| | | | | | | 23 | |
| AS13 | 1 | 2, 6, 14, 16 | 3, 5 | | | 1, 4, 7, 8, 9, | 1, 2, 21, |
| | | | | | | 10, 11, 12, | 22 |
| | | | | | | 13, 15, 17, | |
| | | | | | | 18, 19, 20, | |
| | | | | | | 21, 22, 23 | |
| AS14 | 1 | 2, 14, 16 | 3, 6 | | | 1, 4, 5, 7, 8, | 1, 2, 21, |
| | | | | | | 9, 10, 11, | 22 |
| | | | | | | 12, 13, 15, | |
| | | | | | | 17, 18, 19, | |
| | | | | | | 20, 21, 22, | |
| | | | | | | 23 | |
| AS15 | 1 | 2, 6, 14, 16 | 3, 7 | | | 1, 4, 5, 8, 9, | 1, 2, 21, |
| | | | | | | 10, 11, 12, | 22 |
| | | | | | | 13, 15, 17, | |
| | | | | | | 18, 19, 20, | |
| | | | | | | 21, 22, 23 | |
| AS16 | 1 | 2, 6, 14, 16 | | 3, 5 | | 1, 4, 7, 8, 9, | 1, 2, 21, |
| | | | | | | 10, 11, 12, | 22 |
| | | | | | | 13, 15, 17, | |
| | | | | | | 18, 19, 20, | |
| | | | | | | 21, 22, 23 | |
| AS17 | 1 | 2, 14, 16 | | 3, 6 | | 1, 4, 5, 7, 8, | 1, 2, 21, |
| | | | | | | 9, 10, 11, | 22 |
| | | | | | | 12, 13, 15, | |
| | | | | | | 17, 18, 19, | |
| | | | | | | 20, 21, 22, | |
| | | | | | | 23 | |
| AS18 | 1 | 2, 6, 14, 16 | | 3, 7 | | 1, 4, 5, 8, 9, | 1, 2, 21, |
| | | | | | | 10, 11, 12, | 22 |
| | | | | | | 13, 15, 17, | |
| | | | | | | 18, 19, 20, | |
| | | | | | | 21, 22, 23 | |
| AS19 | 1 | 2, 6, 14, 16 | | | 3, 5 | 1, 4, 7, 8, 9, | 1, 2, 21, |
| | | | | | | 10, 11, 12, | 22 |
| | | | | | | 13, 15, 17, | |
| | | | | | | 18, 19, 20, | |
| | | | | | | 21, 22, 23 | |
| AS20 | 1 | 2, 14, 16 | | | 3, 6 | 1, 4, 5, 7, 8, | 1, 2, 21, |
| | | | | | | 9, 10, 11, | 22 |
| | | | | | | 12, 13, 15, | |
| | | | | | | 17, 18, 19, | |
| | | | | | | 20, 21, 22, | |
| | | | | | | 23 | |
| AS21 | 1 | 2, 6, 14, 16 | | | 3, 7 | 1, 4, 5, 8, 9, | 1, 2, 21, |
| | | | | | | 10, 11, 12, | 22 |
| | | | | | | 13, 15, 17, | |
| | | | | | | 18, 19, 20, | |
| | | | | | | 21, 22, 23 | |
| AS22 | 1 | At least one | None | 3 | At least | At least one | 1, 2, 21, |
| | | of the | | | one of | of the | and/or 22 |
| | | remaining | | | the | remaining | |
| | | positions | | | remaining | positions | |
| | | | | | positions | | |
| AS23 | 1 | At least one | None | 3, 5 | At least | At least one | 1, 2, 21, |
| | | among the | | | one | among the | and/or 22 |
| | | remaining | | | among | remaining | |
| | | positions | | | the | positions | |
| | | | | | remaining | | |
| | | | | | positions | | |
| AS24 | 1 | At least one | None | 3, 6 | At least | At least one | 1, 2, 21, |
| | | among the | | | one | among the | and/or 22 |
| | | remaining | | | among | remaining | |
| | | positions | | | the | positions | |
| | | | | | remaining | | |
| | | | | | positions | | |
| AS25 | 1 | At least one | None | 3, 7 | At least | At least one | 1, 2, 21, |
| | | among the | | | one | among the | and/or 22 |
| | | remaining | | | among | remaining | |
| | | positions | | | the | positions | |
| | | | | | remaining | | |
| | | | | | positions | | |

[0638] In some embodiments, the antisense strand having 23 nucleotides in length has the modification pattern of AS1. In some embodiments, the antisense strand having 23 nucleotides in length has the modification pattern of AS2. In some embodiments, the antisense strand having 23 nucleotides in length has the modification pattern of AS3. In some embodiments, the antisense strand having 23 nucleotides in length has the modification pattern of AS4. In some embodiments, the antisense strand having 23 nucleotides in length has the modification pattern of AS5. In some embodiments, the antisense strand having 23 nucleotides in length has the modification pattern of AS6. In some embodiments, the antisense strand having 23 nucleotides in length has the modification pattern of AS7. In some embodiments, the antisense strand having 23 nucleotides in length has the modification pattern of AS8. In some embodiments, the antisense strand having 23 nucleotides in length has the modification pattern of AS9. In some embodiments, the antisense strand having 23 nucleotides in length has the modification pattern of AS10. In some embodiments, the antisense strand having 23 nucleotides in length has the modification pattern of AS11. In some embodiments, the antisense strand having 23 nucleotides in length has the modification pattern of AS12. In some embodiments, the antisense strand having 23 nucleotides in length has the modification pattern of AS13. In some embodiments, the antisense strand having 23 nucleotides in length has the modification pattern of AS14. In some embodiments, the antisense strand having 23 nucleotides in length has the modification pattern of AS15. In some embodiments, the antisense strand having 23 nucleotides in length has the modification pattern of AS16. In some embodiments, the antisense strand having 23 nucleotides in length has the modification pattern of AS17. In some embodiments, the antisense strand having 23 nucleotides in length has the modification pattern of AS18. In some embodiments, the antisense strand having 23 nucleotides in length has the modification pattern of AS19. In some embodiments, the antisense strand having 23 nucleotides in length has the modification pattern of AS20. In some embodiments, the antisense strand having 23 nucleotides in length has the modification pattern of AS21. In some embodiments, the antisense strand having 23 nucleotides in length has the modification pattern of AS22. In some embodiments, the antisense strand having 23 nucleotides in length has the modification pattern of AS23. In some embodiments, the antisense strand having 23 nucleotides in length has the modification pattern of AS24. In some embodiments, the antisense strand having 23 nucleotides in length has the modification pattern of AS25. In some embodiments, the antisense strand has a modification pattern of AS1, AS2, AS3, AS4, AS5, AS6, AS7, AS8, AS9, AS10, AS11, AS12, AS13, AS14, AS15, AS16, AS17, AS18, AS19, AS20, AS21, AS22, AS23, AS24, or AS25; and comprises a nucleotide sequence selected from SEQ ID NOs: 777-792. In some embodiments, the antisense strand has a modification pattern of AS1, AS2, AS3, AS4, AS5, AS6, AS7, AS8, AS9, AS10, AS11, AS12, AS13, AS14, AS15, AS16, AS17, AS18, AS19, AS20, AS21, AS22, AS23, AS24, or AS25; and comprises SEQ ID NO: 777. In some embodiments, the antisense strand has a modification pattern of AS1, AS2, AS3, AS4, AS5, AS6, AS7, AS8, AS9, AS10, AS11, AS12, AS13, AS14, AS15, AS16, AS17, AS18, AS19, AS20, AS21, AS22, AS23, AS24, or AS25; and comprises SEQ ID NO: 778. In some embodiments, the antisense strand has a modification pattern of AS1, AS2, AS3, AS4, AS5, AS6, AS7, AS8, AS9, AS10, AS11, AS12, AS13, AS14, AS15, AS16, AS17, AS18, AS19, AS20, AS21, AS22, AS23, AS24, or AS25; and comprises SEQ ID NO: 779. In some embodiments, the antisense strand has a modification pattern of AS1, AS2, AS3, AS4, AS5, AS6, AS7, AS8, AS9, AS10, AS11, AS12, AS13, AS14, AS15, AS16, AS17, AS18, AS19, AS20, AS21, AS22, AS23, AS24, or AS25; and comprises SEQ ID NO: 780. In some embodiments, the antisense strand has a modification pattern of AS1, AS2, AS3, AS4, AS5, AS6, AS7, AS8, AS9, AS10, AS11, AS12, AS13, AS14, AS15, AS16, AS17, AS18, AS19, AS20, AS21, AS22, AS23, AS24, or AS25; and comprises SEQ ID NO: 781. In some embodiments, the antisense strand has a modification pattern of AS1, AS2, AS3, AS4, AS5, AS6, AS7, AS8, AS9, AS10, AS11, AS12, AS13, AS14, AS15, AS16, AS17, AS18, AS19, AS20, AS21, AS22, AS23, AS24, or AS25; and comprises SEQ ID NO: 782. In some embodiments, the antisense strand has a modification pattern of AS1, AS2, AS3, AS4, AS5, AS6, AS7, AS8, AS9, AS10, AS11, AS12, AS13, AS14, AS15, AS16, AS17, AS18, AS19, AS20, AS21, AS22, AS23, AS24, or AS25; and comprises SEQ ID NO: 783. In some embodiments, the antisense strand has a modification pattern of AS1, AS2, AS3, AS4, AS5, AS6, AS7, AS8, AS9, AS10, AS11, AS12, AS13, AS14, AS15, AS16, AS17, AS18, AS19, AS20, AS21, AS22, AS23, AS24, or AS25; and comprises SEQ ID NO: 784. In some embodiments, the antisense strand has a modification pattern of AS1, AS2, AS3, AS4, AS5, AS6, AS7, AS8, AS9, AS10, AS11, AS12, AS13, AS14, AS15, AS16, AS17, AS18, AS19, AS20, AS21, AS22, AS23, AS24, or AS25; and comprises SEQ ID NO: 785. In some embodiments, the antisense strand has a modification pattern of AS1, AS2, AS3, AS4, AS5, AS6, AS7, AS8, AS9, AS10, AS11, AS12, AS13, AS14, AS15, AS16, AS17, AS18, AS19, AS20, AS21, AS22, AS23, AS24, or AS25; and comprises SEQ ID NO: 786. In some embodiments, the antisense strand has a modification pattern of AS1, AS2, AS3, AS4, AS5, AS6, AS7, AS8, AS9, AS10, AS11, AS12, AS13, AS14, AS15, AS16, AS17, AS18, AS19, AS20, AS21, AS22, AS23, AS24, or AS25; and comprises SEQ ID NO: 787. In some embodiments, the antisense strand has a modification pattern of AS1, AS2, AS3, AS4, AS5, AS6, AS7, AS8, AS9, AS10, AS11, AS12, AS13, AS14, AS15, AS16, AS17, AS18, AS19, AS20, AS21, AS22, AS23, AS24, or AS25; and comprises SEQ ID NO: 788. In some embodiments, the antisense strand has a modification pattern of AS1, AS2, AS3, AS4, AS5, AS6, AS7, AS8, AS9, AS10, AS11, AS12, AS13, AS14, AS15, AS16, AS17, AS18, AS19, AS20, AS21, AS22, AS23, AS24, or AS25; and comprises SEQ ID NO: 789. In some embodiments, the antisense strand has a modification pattern of AS1, AS2, AS3, AS4, AS5, AS6, AS7, AS8, AS9, AS10, AS11, AS12, AS13, AS14, AS15, AS16, AS17, AS18, AS19, AS20, AS21, AS22, AS23, AS24, or AS25; and comprises SEQ ID NO: 790. In some embodiments, the antisense strand has a modification pattern of AS1, AS2, AS3, AS4, AS5, AS6, AS7, AS8, AS9, AS10, AS11, AS12, AS13, AS14, AS15, AS16, AS17, AS18, AS19, AS20, AS21, AS22, AS23, AS24, or AS25; and comprises SEQ ID NO: 791. In some embodiments, the antisense strand has a modification pattern of AS1, AS2, AS3, AS4, AS5, AS6, AS7, AS8, AS9, AS10, AS11, AS12, AS13, AS14, AS15, AS16, AS17, AS18, AS19, AS20, AS21, AS22, AS23, AS24, or AS25; and comprises SEQ ID NO: 792. In some embodiments, the antisense strand has a modification pattern of AS1; and comprises SEQ ID NO: 777. In some embodiments, the antisense strand has a modification pattern of AS2; and comprises SEQ ID NO: 777. In some embodiments, the antisense strand has a modification pattern of AS3; and comprises SEQ ID NO: 777. In some embodiments, the antisense strand has a modification pattern of AS4; and comprises SEQ ID NO: 777. In some embodiments, the antisense strand has a modification pattern of AS5; and comprises SEQ ID NO: 777. In some embodiments, the antisense strand has a modification pattern of AS6; and comprises SEQ ID NO: 777. In some embodiments, the antisense strand has a modification pattern of AS7; and comprises SEQ ID NO: 777. In some embodiments, the antisense strand has a modification pattern of AS8; and comprises SEQ ID NO: 777. In some embodiments, the antisense strand has a modification pattern of AS9; and comprises SEQ ID NO: 777. In some embodiments, the antisense strand has a modification pattern of AS10; and comprises SEQ ID NO: 777. In some embodiments, the antisense strand has a modification pattern of AS 11; and comprises SEQ ID NO: 777. In some embodiments, the antisense strand has a modification pattern of AS12; and comprises SEQ ID NO: 777. In some embodiments, the antisense strand has a modification pattern of AS13; and comprises SEQ ID NO: 777. In some embodiments, the antisense strand has a modification pattern of AS14; and comprises SEQ ID NO: 777. In some embodiments, the antisense strand has a modification pattern of AS15; and comprises SEQ ID NO: 777. In some embodiments, the antisense strand has a modification pattern of AS16; and comprises SEQ ID NO: 777. In some embodiments, the antisense strand has a modification pattern of AS17; and comprises SEQ ID NO: 777. In some embodiments, the antisense strand has a modification pattern of AS18; and comprises SEQ ID NO: 777. In some embodiments, the antisense strand has a modification pattern of AS19; and comprises SEQ ID NO: 777. In some embodiments, the antisense strand has a modification pattern of AS20; and comprises SEQ ID NO: 777. In some embodiments, the antisense strand has a modification pattern of AS21; and comprises SEQ ID NO: 777. In some embodiments, the antisense strand has a modification pattern of AS22; and comprises SEQ ID NO: 777. In some embodiments, the antisense strand has a modification pattern of AS23; and comprises SEQ ID NO: 777.

dsRNA Modification Pattern

[0639] In an aspect, the dsRNA as described herein includes a sense strand of Formula (I) as described herein and an antisense strand of Formula (II) as described herein. The sense strand and the antisense strand form a duplex. In some embodiments, the sense strand comprises a sequence selected from SEQ ID NO: 761-776; and the antisense sequence comprises a sequence selected from SEQ ID NO: 777-792. In some embodiments, the sense strand comprises a sequence of SEQ ID NO: 761, and the antisense sequence comprises a sequence of SEQ ID NO: 777.

[0640] In some embodiments, the dsRNA includes:
[0641] (i) a sense strand Formula (I) including 2′-MOE modifications at X₁, X₂, X₂₀ and X₂₁; and
[0642] (ii) an antisense strand Formula (II) including a 5′-(E)-VP-2′-OMe modification at X_{1′}. In some embodiments, the sense strand comprises a sequence selected from SEQ ID NO: 761-776; and the antisense sequence comprises a sequence selected from SEQ ID NO: 777-792. In some embodiments, the sense strand comprises a sequence of SEQ ID NO: 761, and the antisense sequence comprises a sequence of SEQ ID NO: 777.

[0643] In some embodiments, the dsRNA includes:
[0644] (i) a sense strand Formula (I) including:
   [0645] (a) 2′-MOE modifications at X₁, X₂, X₂₀ and X₂₁; and
   [0646] (b) 3′-PS modifications at X₁ and X₂, and
[0647] (ii) an antisense strand Formula (II) including:
   [0648] (a) a 5′-(E)-VP-2′-OMe modification at X_{1′}; and
   [0649] (b) 3′-PS modifications at X_{1′}, X_{2′}, X_{21′}, and X_{22′}. In some embodiments, the sense strand comprises a sequence selected from SEQ ID NO: 761-776; and the antisense sequence comprises a sequence selected from SEQ ID NO: 777-792. In some embodiments, the sense strand comprises a sequence of SEQ ID NO: 761, and the antisense sequence comprises a sequence of SEQ ID NO: 777.

[0650] In some embodiments, the dsRNA includes:
[0651] (i) a sense strand Formula (I) including:
   [0652] (a) 2′-MOE modifications at X₁, X₂, X₂₀ and X₂₁; and
   [0653] (b) 3′-PS modifications at X₁, X₂, X₁₉, and X₂₀,
   [0654] and
[0655] (ii) an antisense strand Formula (II) including:
   [0656] (a) a 5′-(E)-VP-2′-OMe modification at X_{1′}; and
   [0657] (b) 3′-PS modifications at X_{1′}, X_{2′}, X_{21′}, and X_{22′}. In some embodiments, the sense strand comprises a sequence selected from SEQ ID NO: 761-776; and the antisense sequence comprises a sequence selected from SEQ ID NO: 777-792. In some embodiments, the sense strand comprises a sequence of SEQ ID NO: 761, and the antisense sequence comprises a sequence of SEQ ID NO: 777.

[0658] In some embodiments, the dsRNA includes:
[0659] (i) a sense strand Formula (I) including:
   [0660] (a) 2′-MOE modifications at X₁, X₂, X₂₀ and X₂₁;
   [0661] (b) 3′-PS modifications at X₁, X₂, X₁₉, and/or X₂₀; and
   [0662] (c) one selected from:
   [0663] (c1) 2′-F modifications at X₇, X₉, X₁₀ and X₁₁; and 2′-OMe modifications in the remaining nucleotides in the sense strand, and
   [0664] (c2) 2′-F modifications at X₇, X₉, and X₁₀; 2′-deoxy modification at X₁₁; and 2′-OMe modifications in the remaining nucleotides in the sense strand,
   [0665] and
[0666] (ii) an antisense strand Formula (II) including:
   [0667] (a) a 5′-(E)-VP-2′-OMe modification at X_{1′};
   [0668] (b) 3′-PS modifications at X_{1′}, X_{2′}, X_{21′}, and X_{22′}; and
   [0669] (c) one selected from:
   [0670] (c1) 2′-F modifications at X_{2′}, X_{6′}, X_{14′} and X_{16′}; and 2′-OMe modifications in the remaining nucleotides in the antisense strand,
   [0671] (c2) 2′-F modifications at X_{2′}, X_{6′}, X_{14′} and X_{16′}; TNA at X_{3′}; and 2′-OMe modifications in the remaining nucleotides in the antisense strand,
   [0672] (c3) 2′-F modifications at X_{2′}, X_{6′}, X_{14′} and X_{16′}; TNA, GNA or 2′-deoxy modification at X_{5′}; and 2′-OMe modifications in the remaining nucleotides in the antisense strand,
   [0673] (c4) 2′-F modifications at X_{2′}, X_{14′} and X_{16′}; TNA, GNA or 2′-deoxy modification at X_{6′}; and 2′-OMe modifications in the remaining nucleotides in the antisense strand, and
   [0674] (c5) 2′-F modifications at X_{2′}, X_{6′}, X_{14′} and X_{16′}; TNA, GNA or 2′-deoxy modification at X_{7′}; and 2′-OMe modifications in the remaining nucleotides in the antisense strand. In some embodiments, the sense strand comprises a sequence selected from SEQ ID NO: 761-776; and the antisense sequence comprises a sequence selected from SEQ ID NO: 777-792. In some embodiments, the sense strand comprises a sequence of SEQ ID NO: 761, and the antisense sequence comprises a sequence of SEQ ID NO: 777.

[0675] In some embodiments, the dsRNA includes:
[0676] (i) a sense strand of Formula (I′) including TNAs at X₁, X₂, X₂₀ and X₂₁; and
[0677] (ii) an antisense strand of Formula (II) including a 5′-(E)-VP-2′-OMe modification at X_{1′}. In some embodiments, the sense strand comprises a sequence selected from SEQ ID NO: 761-776; and the antisense sequence comprises a sequence selected from SEQ ID NO: 777-792. In some embodiments, the sense strand comprises a sequence of SEQ ID NO: 761, and the antisense sequence comprises a sequence of SEQ ID NO: 777.

[0678] In some embodiments, the dsRNA includes:
[0679] (i) a sense strand of Formula (I′) including:
   [0680] (a) TNAs at X₁, X₂, X₂₀ and X₂₁; and
   [0681] (b) 3′-PS modifications at X₁ and X₂,
   [0682] and
[0683] (ii) an antisense strand of Formula (II) including:
   [0684] (a) a 5′-(E)-VP-2′-OMe modification at X_{1′}; and
   [0685] (b) 3′-PS modifications at X_{1′}, X_{2′}, X_{21′}, and X_{22′}. In some embodiments, the sense strand comprises a sequence selected from SEQ ID NO: 761-776; and the antisense sequence comprises a sequence selected from SEQ ID NO: 777-792. In some embodiments, the sense strand comprises a sequence of SEQ ID NO: 761, and the antisense sequence comprises a sequence of SEQ ID NO: 777.

[0686] In some embodiments, the dsRNA includes:
[0687] (i) a sense strand of Formula (I′) including:
   [0688] (a) TNAs at X₁, X₂, X₂₀ and X₂₁; and
   [0689] (b) 3′-PS modifications at X₁, X₂, X₁₉, and X₂₀,
   [0690] and
[0691] (ii) an antisense strand of Formula (II) including:
   [0692] (a) a 5′-(E)-VP-2′-OMe modification at X_{1′}; and
   [0693] (b) 3′-PS modifications at X_{1′}, X_{2′}, X_{21′}, and X_{22′}. In some embodiments, the sense strand comprises a sequence selected from SEQ ID NO: 761-776; and the antisense sequence comprises a sequence selected from SEQ ID NO: 777-792. In some embodiments, the sense strand comprises a sequence of SEQ ID NO: 761, and the antisense sequence comprises a sequence of SEQ ID NO: 777.

[0694] In some embodiments, the dsRNA includes:
[0695] (i) a sense strand of Formula (I′) including:
   [0696] (a) TNAs at X₁, X₂, X₂₀ and X₂₁;
   [0697] (b) 3′-PS modifications at X₁, X₂, X₁₉, and/or X₂₀; and
   [0698] (c) one selected from:
   [0699] (c1) 2′-F modifications at X₇, X₉, X₁₀ and X₁₁; and 2′-OMe modifications in the remaining nucleotides in the sense strand, and
   [0700] (c2) 2′-F modifications at X₇, X₉, and X₁₀; 2′-deoxy modification at X₁₁; and 2′-OMe modifications in the remaining nucleotides in the sense strand,
   [0701] and
[0702] (ii) an antisense strand of Formula (II) including:
   [0703] (a) a 5′-(E)-VP-2′-OMe modification at X_{1′};
   [0704] (b) 3′-PS modifications at X_{1′}, X_{2′}, X_{21′}, and X_{22′}; and
   [0705] (c) one selected from:
   [0706] (c1) 2′-F modifications at X_{2′}, X_{6′}, X_{14′} and X_{16′}; and 2′-OMe modifications in the remaining nucleotides in the antisense strand,
   [0707] (c2) 2′-F modifications at X_{2′}, X_{6′}, X_{14′} and X_{16′}; TNA at X_{3′}; and 2′-OMe modifications in the remaining nucleotides in the antisense strand,
   [0708] (c3) 2′-F modifications at X_{2′}, X_{6′}, X_{14′} and X_{16′}; TNA, GNA or 2′-deoxy modification at X₅; and 2′-OMe modifications in the remaining nucleotides in the antisense strand,
   [0709] (c4) 2′-F modifications at X_{2′}, X_{14′} and X_{16′}; TNA, GNA or 2′-deoxy modification at X_{6′}; and 2′-OMe modifications in the remaining nucleotides in the antisense strand, and
   [0710] (c5) 2′-F modifications at X_{2′}, X_{6′}, X_{14′} and X_{16′}; TNA, GNA or 2′-deoxy modification at X_{7′}; and 2′-OMe modifications in the remaining nucleotides in the antisense strand. In some embodiments, the sense strand comprises a sequence selected from SEQ ID NO: 761-776; and the antisense sequence comprises a sequence selected from SEQ ID NO: 777-792. In some embodiments, the sense strand comprises a sequence of SEQ ID NO: 761, and the antisense sequence comprises a sequence of SEQ ID NO: 777.

[0711] In certain aspects, the dsRNA as described herein includes a sense strand having 21 nucleotides in length and an antisense strand having 23 nucleotides.

[0712] In certain aspects, the dsRNA as described herein includes a sense strand having 21 nucleotides in length and including 2′-MOE modifications at the 1st, 2nd, 20th and 21st nucleotides from the 5′ end of the sense strand.

[0713] In certain aspects, the dsRNA as described herein includes antisense strand having 23 nucleotides in length and including a 5′-(E)-VP-2′-OMe modification at the 1st position from 5′ end of the antisense strand.

[0714] In some embodiments, the dsRNA includes:
[0715] (i) a sense strand having 21 nucleotides in length and including:
   [0716] (a) 2′-MOE modifications at the 1st, 2nd, 20th and 21st nucleotides from the 5′ end of the sense strand, and
   [0717] (b) 3′-PS modifications at the 1st and 2nd nucleotides from 5′ end of the sense strand, and
[0718] (ii) an antisense strand having 23 nucleotides in length and including:
   [0719] (a) a 5′-(E)-VP-2′-OMe modification at the 1st position from 5′ end of the antisense strand, and
   [0720] (b) 3′-PS modifications at the 1st, 2nd, 21st, and 22nd nucleotides from 5′ end of the antisense strand. In some embodiments, the sense strand comprises a sequence selected from SEQ ID NO: 761-776; and the antisense sequence comprises a sequence selected from SEQ ID NO: 777-792. In some embodiments, the sense strand comprises a sequence of SEQ ID NO: 761, and the antisense sequence comprises a sequence of SEQ ID NO: 777.

[0721] In some embodiments, the dsRNA includes:
[0722] (i) a sense strand having 21 nucleotides in length and including:
   [0723] (a) 2′-MOE modifications at the 1st, 2nd, 20th and 21st nucleotides from the 5′ end of the sense strand, and
   [0724] (b) 3′-PS modifications at the 1st, 2nd, 19th, and 20th nucleotides from 5′ end of the sense strand,
   [0725] and
[0726] (ii) an antisense strand having 23 nucleotides in length and including:
   [0727] (a) a 5′-(E)-VP-2′-OMe modification at the 1^{st} position from 5′ end of the antisense strand, and
   [0728] (b) 3′-PS modifications at the 1^{st}, 2^{nd}, 21^{st}, and 22^{nd} nucleotides from 5′ end of the antisense strand. In some embodiments, the sense strand comprises a sequence selected from SEQ ID NO: 761-776; and the antisense sequence comprises a sequence selected from SEQ ID NO: 777-792. In some embodiments, the sense strand comprises a sequence of SEQ ID NO: 761, and the antisense sequence comprises a sequence of SEQ ID NO: 777.

[0729] In some embodiments, the dsRNA includes:
[0730] (i) a sense strand having 21 nucleotides in length and including:
   [0731] (a) 2′-MOE modifications at the 1st, 2nd, 20th and 21st nucleotides from the 5′ end of the sense strand,
   [0732] (b) 3′-PS modifications at the 1st, 2nd, 19th, and/or 20th nucleotides from 5′ end of the sense strand, and
   [0733] (c) one selected from:
   [0734] (c1) 2′-F modifications at 7th, 9th, 10th, and 11th nucleotides; and 2′-OMe modifications in the remaining nucleotides in the sense strand, and
   [0735] (c2) 2′-F modifications at 7th, 9th, and 10th nucleotides; 2′-deoxy modification at 11th nucleotide; and 2′-OMe modifications in the remaining nucleotides in the sense strand,
   [0736] and
[0737] (ii) an antisense strand having 23 nucleotides in length and including:
   [0738] (a) a 5′-(E)-VP-2′-OMe modification at the 1^{st} position from 5′ end of the antisense strand,
   [0739] (b) 3′-PS modifications at the 1st, 2nd, 21st, and 22nd nucleotides from 5′ end of the antisense strand, and
   [0740] (c) one selected from:
   [0741] (c1) 2′-F modifications at the 2nd, 6th, 14th, and 16th nucleotides from 5′ end; and 2′-OMe modifications in the remaining nucleotides in the antisense strand,
   [0742] (c2) 2′-F modifications at the 2nd, 6th, 14th, and 16th nucleotides from 5′ end; TNA at the 3rd nucleotide from 5′ end; and 2′-OMe modifications in the remaining nucleotides in the antisense strand,
   [0743] (c3) 2′-F modifications at the 2nd, 6th, 14th, and 16th nucleotides from 5′ end; TNA, GNA or 2′-deoxy modification at the 5th nucleotide from 5′ end; and 2′-OMe modifications in the remaining nucleotides in the antisense strand,
   [0744] (c4) 2′-F modifications at the 2nd, 14th, and 16th nucleotides from 5′ end; TNA, GNA or 2′-deoxy modification at the 6th nucleotide from 5′ end; and 2′-OMe modifications in the remaining nucleotides in the antisense strand, and
   [0745] (c5) 2′-F modifications at the 2nd, 6th, 14th, and 16th nucleotides from 5′ end; TNA, GNA or 2′-deoxy modification at the 7th nucleotide from 5′ end; and 2′-OMe modifications in the remaining nucleotides in the antisense strand. In some embodiments, the sense strand comprises a sequence selected from SEQ ID NO: 761-776; and the antisense sequence comprises a sequence selected from SEQ ID NO: 777-792. In some embodiments, the sense strand comprises a sequence of SEQ ID NO: 761, and the antisense sequence comprises a sequence of SEQ ID NO: 777.

[0746] In some embodiments, the dsRNA includes:
[0747] (i) a sense strand having 21 nucleotides in length and including:
   [0748] (a) TNAs at the 1st, 2nd, 20th and 21st nucleotides from the 5′ end, and
   [0749] (b) 3′-PS modifications at the 1st and 2nd nucleotides from the 5′ end, and
[0750] (ii) an antisense strand having 23 nucleotides in length and including:
   [0751] (a) a 5′-(E)-VP-2′-OMe modification at the 1st position from the 5′ end, and
   [0752] (b) 3′-PS modifications at the 1st, 2nd, 21st, and 22nd nucleotides from the 5′ end. In some embodiments, the sense strand comprises a sequence selected from SEQ ID NO: 761-776; and the antisense sequence comprises a sequence selected from SEQ ID NO: 777-792. In some embodiments, the sense strand comprises a sequence of SEQ ID NO: 761, and the antisense sequence comprises a sequence of SEQ ID NO: 777.

[0753] In some embodiments, the dsRNA includes:
[0754] (i) a sense strand having 21 nucleotides in length and including:
   [0755] (a) TNAs at the 1st, 2nd, 20th and 21st nucleotides from the 5′ end, and
   [0756] (b) 3′-PS modifications at the 1st, 2nd, 19th, and 20th nucleotides from the 5′ end,
   [0757] and
[0758] (ii) an antisense strand having 23 nucleotides in length and including:
   [0759] (a) a 5′-(E)-VP-2′-OMe modification at the 1^{st} position from the 5′ end, and
   [0760] (b) 3′-PS modifications at the 1st, 2nd, 21st, and 22nd nucleotides from the 5′ end. In some embodiments, the sense strand comprises a sequence selected from SEQ ID NO: 761-776; and the antisense sequence comprises a sequence selected from SEQ ID NO: 777-792. In some embodiments, the sense strand comprises a sequence of SEQ ID NO: 761, and the antisense sequence comprises a sequence of SEQ ID NO: 777.

[0761] In some embodiments, the dsRNA includes:
[0762] (i) a sense strand having 21 nucleotides in length and including:
   [0763] (a) TNAs at the 1st, 2nd, 20th and 21st nucleotides from the 5′ end,
   [0764] (b) 3′-PS modifications at the 1st, 2nd, 19th, and/or 20th nucleotides from the 5′ end, and
   [0765] (c) one selected from:
   [0766] (c1) 2′-F modifications at the 7th, 9th, 10th, and 11th nucleotides from the 5′ end; and 2′-OMe modifications in the remaining nucleotides in the sense strand, and
   [0767] (c2) 2′-F modifications at the 7th, 9th, and 10th nucleotides from the 5′ end; 2′-deoxy modification at the 11th nucleotide from the 5′ end; and 2′-OMe modifications in the remaining nucleotides in the sense strand,
   [0768] and
[0769] (ii) an antisense strand having 23 nucleotides in length and including:
   [0770] (a) a 5′-(E)-VP-2′-OMe modification at the 1^{st} position from the 5′ end,
   [0771] (b) 3′-PS modifications at the 1st, 2nd, 21st, and 22nd nucleotides from the 5′ end, and
   [0772] (c) one selected from:
   [0773] (c1) 2′-F modifications at the 2nd, 6th, 14th, and 16th nucleotides from the 5′ end; and 2′-OMe modifications in the remaining nucleotides in the antisense strand,
   [0774] (c2) 2′-F modifications at the 2nd, 6th, 14th, and 16th nucleotides from the 5′ end; TNA at the 3rd nucleotide from the 5′ end; and 2′-OMe modifications in the remaining nucleotides in the antisense strand,
   [0775] (c3) 2′-F modifications at the 2nd, 6th, 14th, and 16th nucleotides from the 5′ end; TNA, GNA or 2′-deoxy modification at the 5th nucleotide from the 5′ end; and 2′-OMe modifications in the remaining nucleotides in the antisense strand,
   [0776] (c4) 2′-F modifications at the 2nd, 14th, and 16th nucleotides from the 5′ end; TNA, GNA or 2′-deoxy modification at the 6th nucleotide from the 5′ end; and 2′-OMe modifications in the remaining nucleotides in the antisense strand, and
   [0777] (c5) 2′-F modifications at the 2nd, 6th, 14th, and 16th nucleotides from the 5′ end; TNA, GNA or 2′-deoxy modification at the 7th nucleotide from the 5′ end; and 2′-OMe modifications in the remaining nucleotides in the antisense strand. In some embodiments, the sense strand comprises a sequence selected from SEQ ID NO: 761-776; and the antisense sequence comprises a sequence selected from SEQ ID NO: 777-792. In some embodiments, the sense strand comprises a sequence of SEQ ID NO: 761, and the antisense sequence comprises a sequence of SEQ ID NO: 777.

[0778] In some embodiments, the dsRNA includes:
[0779] (i) a sense strand that has a modification pattern of SS1, SS2, SS3, SS4, SS5, SS6, SS7, SS8, SS9, SS10, or SS11 and comprises a sequence of SEQ ID NO: 761; and
[0780] (ii) an antisense strand that has a modification pattern of AS1, AS2, AS3, AS4, AS5, AS6, AS7, AS8, AS9, AS10, ASH, AS12, AS13, AS14, AS15, AS16, AS17, AS18, AS19, AS20, AS21, AS22, AS23, AS24, or AS25 and comprises a sequence of SEQ ID NO: 777.

[0781] In some embodiments, the dsRNA includes:
[0782] a sense strand that has a modification pattern of SS10 or SS11 and comprises a sequence of SEQ ID NO: 761; and
[0783] an antisense strand that has a modification pattern of AS23, AS24, or AS25 and comprises a sequence of SEQ ID NO: 777.

[0784] Exemplary dsRNAs (siRNA) with modified nucleotides, including sense strands and antisense strands targeting the above indicated PCSK9 mRNA, are shown in Table 5.

TABLE 5
Examples of modified nucleotide sequence of PCSK9 siRNA

| | Site | | | | |
|---|---|---|---|---|---|
| | of | | SEQ | | SEQ |
| siRNA | mRNA | | ID | | ID |
| No. | target | Sense strand | NO. | Antisense strand | NO. |
| M1 | 3551 | C004p001U004p001A004pG0 | 793 | A004p001C007p001A004pA00 | 846 |
| | | 04pA004pC004pC007pU004p | | 7pA007pA007pG004pC007pA0 | |
| | | G007pU004pT002pU004pU00 | | 04pA007pA004pA007pC004pA | |
| | | 4pG004pC004pU004pU004pU | | 007pG004pG007pU004pC007p | |
| | | 004pU004pG004pU004 | | U004pA004pG004p001A004p0 | |
| | | | | 01A004 | |
| M2 | 3551 | C004p001U004p001A004pG0 | 794 | A004p001C007p001A004pA00 | 847 |
| | | 04pA004pC004pC007pU004p | | 4pA004pA007pG004pC004pA0 | |
| | | G007pU007pT002pU004pU00 | | 04pA004pA004pA004pC004pA | |
| | | 4pG004pC004pU004pU004pU | | 007pG004pG007pU004pC004p | |
| | | 004pU004pG004pU004 | | U004pA004pG004p001A004p0 | |
| | | | | 01A004 | |
| M3 | 3551 | C004p001U004p001A004pG0 | 795 | X033A1027p001C007p001A00 | 848 |
| | | 04pA004pC004pC007pU004p | | 4pA004pA004pA007pG004pC0 | |
| | | G007pU007pT002pU004pU00 | | 04pA004pA004pA004pA004pC | |
| | | 4pG004pC004pU004pU004pU | | 004pA007pG004pG007pU004p | |
| | | 004pU004pG004pU004 | | C004pU004pA004pG004p001A | |
| | | | | 004p001A004 | |
| M4 | 3551 | C005p001T005p001A004pG0 | 796 | X033A1027p001C007p001A00 | 849 |
| | | 04pA004pC004pC007pU004p | | 4pA004pA004pA007pG004pC0 | |
| | | G007pU007pT002pU004pU00 | | 04pA004pA004pA004pA004pC | |
| | | 4pG004pC004pU004pU004pU | | 004pA007pG004pG007pU004p | |
| | | 004pU004pG005pT005 | | C004pU004pA004pG004p001A | |
| | | | | 004p001A004 | |
| M5 | 3551 | C005p001T005p001A004pG0 | 797 | A004p001C007p001A004pA00 | 850 |
| | | 04pA004pC004pC007pU004p | | 4pA004pA007pG004pC004pA0 | |
| | | G007pU007pT002pU004pU00 | | 04pA004pA004pA004pC004pA | |
| | | 4pG004pC004pU004pU004pU | | 007pG004pG007pU004pC004p | |
| | | 004pU004pG005pT005 | | U004pA004pG004p001A004p0 | |
| | | | | 01A004 | |
| M6 | 3551 | C005p001T005p001A004pG0 | 798 | X033U1027p001C007p001A00 | 851 |
| | | 04pA004pC004pC007pU004p | | 4pA004pA004pA007pG004pC0 | |
| | | G007pU007pT002pU004pU00 | | 04pA004pA004pA004pA004pC | |
| | | 4pG004pC004pU004pU004pU | | 004pA007pG004pG007pU004p | |
| | | 004pU004pG005pA005 | | C004pU004pA004pG004p001A | |
| | | | | 005p001A005 | |
| M7 | 3551 | C004p001U004p001A004pG0 | 799 | A004p001C007p001A004pA00 | 852 |
| | | 04pA004pC004pC007pU004p | | 7pA007pA007pG004pC007pA0 | |
| | | G007pU004pT002pU004pU00 | | 04pA007pA004pA007pC004pA | |
| | | 4pG004pC004pU004pU004pU | | 007pG004pG007pU004pC007p | |
| | | 004pU004pG004pU004 | | U004pA004pG004p001A004p0 | |
| | | | | 01A004 | |
| M8 | 3551 | C005p001T005p001A004pG0 | 800 | X033A1027p001C007p001A00 | 853 |
| | | 04pA004pC004pC007pU004p | | 4pA004pA004pA007pG004pC0 | |
| | | G007pU007pT002pU004pU00 | | 04pA004pA004pA004pA004pC | |
| | | 4pG004pC004pU004pU004pU | | 004pA007pG004pG007pU004p | |
| | | 004pU004pG005pT005 | | C004pU004pA004pG004p001A | |
| | | | | 004p001A004 | |
| M9 | 3551 | C005p001T005p001A004pG0 | 801 | A004p001C007p001A004pA00 | 854 |
| | | 04pA004pC004pC007pU004p | | 4pA004pA007pG004pC004pA0 | |
| | | G007pU007pT002pU004pU00 | | 04pA004pA004pA004pC004pA | |
| | | 4pG004pC004pU004pU004pU | | 007pG004pG007pU004pC004p | |
| | | 004pU004pG005pT005 | | U004pA004pG004p001A004p0 | |
| | | | | 01A004 | |
| M10 | 3551 | C004p001U004p001A004pG0 | 802 | X033A1027p001C007p001A00 | 855 |
| | | 04pA004pC004pC007pU004p | | 4pA004pA004pA007pG004pC0 | |
| | | G007pU007pT002pU004pU00 | | 04pA004pA004pA004pA004pC | |
| | | 4pG004pC004pU004pU004pU | | 004pA007pG004pG007pU004p | |
| | | 004pU004pG004pU004 | | C004pU004pA004pG004p001A | |
| | | | | 004p001A004 | |
| M11 | 3551 | C005p001T005p001A004pG0 | 803 | X033U1027p001C007p001A00 | 856 |
| | | 04pA004pC004pC007pU004p | | 4pA004pA004pA007pG004pC0 | |
| | | G007pU007pT002pU004pU00 | | 04pA004pA004pA004pA004pC | |
| | | 4pG004pC004pU004pU004pU | | 004pA007pG004pG007pU004p | |
| | | 004pU004pG005pA005 | | C004pU004pA004pG004p001A | |
| | | | | 004p001A004 | |
| M12 | 3551 | C005p001T005p001A004pG0 | 804 | X033U1027p001C007p001A00 | 857 |
| | | 04pA004pC004pC007pU004p | | 4pA004pA004pA007pG004pC0 | |
| | | G007pU007pT002pU004pU00 | | 04pA004pA004pA004pA004pC | |
| | | 4pG004pC004pU004pU004pU | | 004pA007pG004pG007pU004p | |
| | | 004pU004p001G005p001A00 | | C004pU004pA004pG004p001A | |
| | | 5 | | 004p001A004 | |
| M13 | 3551 | C005p001T005p001A004pG0 | 805 | X033A1027p001C007p001A00 | 858 |
| | | 04pA004pC004pC007pU004p | | 4pA004pA004pA007pG004pC0 | |
| | | G007pU007pU007pU004pU0 | | 04pA004pA004pA004pA004pC | |
| | | 04pG004pC004pU004pU004p | | 004pA007pG004pG007pU004p | |
| | | U004pU004pG005pT005 | | C004pU004pA004pG004p001A | |
| | | | | 004p001A004 | |
| M14 | 3551 | C005p001T005p001A004pG0 | 806 | X033A1027p001C007p001A00 | 859 |
| | | 04pA004pC004pC007pU004p | | 4pA004pA004pA007pG004pC0 | |
| | | G007pU007pT002pU004pU00 | | 04pA004pA004pA004pA004pC | |
| | | 4pG004pC004pU004pU004pU | | 004pA007pG004pG007pU004p | |
| | | 004pU004p001G005p001T005 | | C004pU004pA004pG004p001A | |
| | | | | 004p001A004 | |
| M15 | 3551 | C005p001T005p001A004pG0 | 807 | X033A1027p001C007p001A00 | 860 |
| | | 04pA004pC004pC007pU004p | | 4pA004pA004pA007pG004pC0 | |
| | | G007pU007pU007pU004pU0 | | 04pA004pA004pA004pA004pC | |
| | | 04pG004pC004pU004pU004p | | 004pA007pG004pG007pU004p | |
| | | U004pU004p001G005p001TO | | C004pU004pA004pG004p001A | |
| | | 05 | | 004p001A004 | |
| M16 | 3551 | C005p001T005p001A004pG0 | 808 | A004p001C007p001A004pA00 | 861 |
| | | 04pA004pC004pC007pU004p | | 4pA004pA007pG004pC004pA0 | |
| | | G007pU007pT002pU004pU00 | | 04pA004pA004pA004pC004pA | |
| | | 4pG004pC004pU004pU004pU | | 007pG004pG007pU004pC004p | |
| | | 004pU004p001G005p001T005 | | U004pA004pG004p001A004p0 | |
| | | | | 01A004 | |
| M17 | 3551 | C005p001T005p001A004pG0 | 809 | A004p001C007p001A004pA00 | 862 |
| | | 04pA004pC004pC007pU004p | | 4pA004pA007pG004pC004pA0 | |
| | | G007pU007pU007pU004pU0 | | 04pA004pA004pA004pC004pA | |
| | | 04pG004pC004pU004pU004p | | 007pG004pG007pU004pC004p | |
| | | U004pU004p001G005p001TO | | U004pA004pG004p001A004p0 | |
| | | 05 | | 01A004 | |
| M18 | 3551 | C005p001T005p001A004pG0 | 810 | X033A1027p001C007p001A04 | 863 |
| | | 04pA004pC004pC007pU004p | | 2pA004pA004pA007pG004pC0 | |
| | | G007pU007pT002pU004pU00 | | 04pA004pA004pA004pA004pC | |
| | | 4pG004pC004pU004pU004pU | | 004pA007pG004pG007pU004p | |
| | | 004pU004pG005pT005 | | C004pU004pA004pG004p001A | |
| | | | | 004p001A004 | |
| M19 | 3551 | C005p001T005p001A004pG0 | 811 | X033A1027p001C007p001A04 | 864 |
| | | 04pA004pC004pC007pU004p | | 2pA004pA004pA007pG004pC0 | |
| | | G007pU007pT002pU004pU00 | | 04pA004pA004pA004pA004pC | |
| | | 4pG004pC004pU004pU004pU | | 004pA007pG004pG007pU004p | |
| | | 004pU004p001G005p001T005 | | C004pU004pA004pG004p001A | |
| | | | | 004p001A004 | |
| M20 | 3551 | C042p001U042p001A004pG0 | 812 | X033A1027p001C007p001A00 | 865 |
| | | 04pA004pC004pC007pU004p | | 4pA004pA004pA007pG004pC0 | |
| | | G007pU007pT002pU004pU00 | | 04pA004pA004pA004pA004pC | |
| | | 4pG004pC004pU004pU004pU | | 004pA007pG004pG007pU004p | |
| | | 004pU004pG042pU042 | | C004pU004pA004pG004p001A | |
| | | | | 004p001A004 | |
| M21 | 3551 | C042p001U042p001A004pG0 | 813 | X033A1027p001C007p001A00 | 866 |
| | | 04pA004pC004pC007pU004p | | 4pA004pA004pA007pG004pC0 | |
| | | G007pU007pT002pU004pU00 | | 04pA004pA004pA004pA004pC | |
| | | 4pG004pC004pU004pU004pU | | 004pA007pG004pG007pU004p | |
| | | 004pU004p001G042p001U04 | | C004pU004pA004pG004p001A | |
| | | 2 | | 004p001A004 | |
| M22 | 3551 | C042p001U042p001A004pG0 | 814 | X033A1027p001C007p001A04 | 867 |
| | | 04pA004pC004pC007pU004p | | 2pA004pA004pA007pG004pC0 | |
| | | G007pU007pT002pU004pU00 | | 04pA004pA004pA004pA004pC | |
| | | 4pG004pC004pU004pU004pU | | 004pA007pG004pG007pU004p | |
| | | 004pU004pG042pU042 | | C004pU004pA004pG004p001A | |
| | | | | 004p001A004 | |
| M23 | 3551 | C042p001U042p001A004pG0 | 815 | X033A1027p001C007p001A04 | 868 |
| | | 04pA004pC004pC007pU004p | | 2pA004pA004pA007pG004pC0 | |
| | | G007pU007pT002pU004pU00 | | 04pA004pA004pA004pA004pC | |
| | | 4pG004pC004pU004pU004pU | | 004pA007pG004pG007pU004p | |
| | | 004pU004p001G042p001U04 | | C004pU004pA004pG004p001A | |
| | | 2 | | 004p001A004 | |
| M24 | 3492 | C005p001A005p001A004pG0 | 816 | X033U1027p001A007p001A00 | 869 |
| | | 04pC004pA004pG007pA004p | | 4pA004pA004pG007pA004pU0 | |
| | | C007pA007pU007pU004pU00 | | 04pA004pA004pA004pU004pG | |
| | | 4pA004pU004pC004pU004pU | | 004pU007pC004pU007pG004p | |
| | | 004pU004PT005pA005 | | C004pU004pU004pG004p001C | |
| | | | | 004p001U004 | |
| M25 | 3543 | C005p001A005p001A004pC0 | 817 | X033A1027p001A007p001A00 | 870 |
| | | 04pU004pU004pU007pU004p | | 4pA004pC004pA007pG004pG0 | |
| | | C007pU007pA007pG004pA00 | | 04pU004pC004pU004pA004pG | |
| | | 4pC004pC004pU004pG004pU | | 004pA007pA004pA007pA004p | |
| | | 004pU004pT005pT005 | | G004pU004pU004pG004p001G | |
| | | | | 004p001C004 | |
| M26 | 3564 | G005p001C005p001U004pU0 | 818 | X033A1027p001U007p001A00 | 871 |
| | | 04pU004pU004pG007pU004p | | 4pU004pC004pU007pU004pC0 | |
| | | A007pA007pC007pU004pU00 | | 04pA004pA004pG004pU004pU | |
| | | 4pG004pA004pA004pG004p | | 004pA007pC004pA007pA004p | |
| | | A004pU004pA005pT005 | | A004pA004pG004pC004p001A | |
| | | | | 004p001A004 | |
| M27 | 713 | T005p001T005p001G004pA0 | 819 | X033U1027p001U007p001C00 | 872 |
| | | 04pA004pG004pU007pU004p | | 4pG004pA004pC007pA004pU0 | |
| | | G007pC007pC007pC004pC00 | | 04pG004pG004pG004pG004pC | |
| | | 4pA004pU004pG004pU004pC | | 004pA007pA004pC007pU004p | |
| | | 004pG004pA005pA005 | | U004pC004pA004pA004p001G | |
| | | | | 004p001G004 | |
| M28 | 1102 | C005p001C005p001U004pC0 | 820 | X033A1027p001U007p001A00 | 873 |
| | | 04pA004pU004pA007pG004p | | 4pA004pA004pC007pU004pC0 | |
| | | G007pC007pC007pU004pG00 | | 04pC004pA004pG004pG004pC | |
| | | 4pG004pA004pG004pU004p | | 004pC007pU004pA007pU004p | |
| | | U004pU004pA005pT005 | | G004pA004pG004pG004p001G | |
| | | | | 004p001U004 | |
| M29 | 3251 | A005p001A005p001G004pCO | 821 | X033A1027p001A007p001G00 | 874 |
| | | 04pC004pA004pA007pG004p | | 4pU004pA004pA007pG004pA0 | |
| | | C007pC007pU007pC004pU00 | | 04pA004pG004pA004pG004pG | |
| | | 4pU004pC004pU004pU004pA | | 004pC007pU004pU007pG004p | |
| | | 004pC004pT005pT005 | | G004pC004p001U004p001U00 | |
| | | | | 4pC004pA004 | |
| M30 | 3252 | A005p001G005p001C004pC0 | 822 | X033U1027p001A007p001A00 | 875 |
| | | 04pA004pA004pG007pC004p | | 4pG004pU004pA007pA004pG0 | |
| | | C007pU007pC007pU004pU00 | | 04pA004pA004pG004pA004pG | |
| | | 4pC004pU004pU004pA004pC | | 004pG007pC004pU007pU004p | |
| | | 004pU004pT005pA005 | | G004pG004pC004pU004p001U | |
| | | | | 004p001C004 | |
| M31 | 3547 | T005p001T005p001U004pU0 | 823 | X033A1027p001A007p001G00 | 876 |
| | | 04pC004pU004pA007pG004p | | 4pC004pA004pA007pA004pA0 | |
| | | A007pC007pC007pU004pG00 | | 04pC004pA004pG004pG004pU | |
| | | 4pU004pU004pU004pU004p | | 004pC007pU004pA007pG004p | |
| | | G004pC004pT005pT005 | | A004pA004p001A004p001A00 | |
| | | | | 4pG004pU004 | |
| M32 | 3553 | A005p001G005p001A004pC0 | 824 | X033U1027p001U007p001A00 | 877 |
| | | 04pC004pU004pG007pU004p | | 4pC004pA004pA007pA004pA0 | |
| | | U007pU007pU007pG004pC00 | | 04pG004pC004pA004pA004pA | |
| | | 4pU004pU004pU004pU004p | | 004pA007pC004pA007pG004p | |
| | | G004pU004pA005pA005 | | G004pU004pC004pU004p001A | |
| | | | | 004p001G004 | |
| M33 | 3568 | T005p001T005p001G004pU0 | 825 | X033A1027p001U007p001A00 | 878 |
| | | 04pA004pA004pC007pU004p | | 4pA004pA004pU007pA004pU0 | |
| | | U007pG007pA007pA004pG0 | | 04pC004pU004pU004pC004pA | |
| | | 04pA004pU004pA004pU004p | | 004pA007pG004pU007pU004p | |
| | | U004pU004pA005pT005 | | A004pC004p001A004p001A00 | |
| | | | | 4pA004pA004 | |
| M34 | 3559 | G005p001T005p001U004pU0 | 826 | X033U1027p001U007p001C00 | 879 |
| | | 04pU004pG004pC007pU004p | | 4pA004pA004pG007pU004pU0 | |
| | | U007pU007pU007pG004pU0 | | 04pA004pC004pA004pA004pA | |
| | | 04pA004pA004pC004pU004p | | 004pA007pG004pC007pA004p | |
| | | U004pG004pA005pA005 | | A004pA004pA004pC004p001A | |
| | | | | 004p001G004 | |
| M35 | 3547 | T005p001T005p001U004pU0 | 827 | X033A1027p001A007p001G00 | 880 |
| | | 04pC004pU004pA004pG004p | | 4pC004pA004pA007pA004pA0 | |
| | | A007pC007pC007pU004pG00 | | 04pC004pA004pG004pG004pU | |
| | | 4pU004pU004pU004pU004p | | 004pC007pU004pA007pG004p | |
| | | G004pC004p001T005p001TO | | A004pA004p001A004p001A00 | |
| | | 05 | | 4pG004pU004 | |
| M36 | 3553 | A005p001G005p001A004pC0 | 828 | X033U1027p001U007p001A00 | 881 |
| | | 04pC004pU004pG007pU004p | | 4pC004pA004pA007pA004pA0 | |
| | | U007pU007pU007pG004pC00 | | 04pG004pC004pA004pA004pA | |
| | | 4pU004pU004pU004pU004p | | 004pA007pC004pA007pG004p | |
| | | G004pU004p001A005p001A0 | | G004pU004pC004pU004p001A | |
| | | 05 | | 004p001G004 | |
| M37 | 3568 | T005p001T005p001G004pU0 | 829 | X033A1027p001U007p001A00 | 882 |
| | | 04pA004pA004pC004pU004p | | 4pA004pA004pU007pA004pU0 | |
| | | U007pG007pA007pA004pG0 | | 04pC004pU004pU004pC004pA | |
| | | 04pA004pU004pA004pU004p | | 004pA007pG004pU007pU004p | |
| | | U004pU004p001A005p001TO | | A004pC004p001A004p001A00 | |
| | | 05 | | 4pA004pA004 | |
| M38 | 3559 | G005p001T005p001U004pU0 | 830 | X033U1027p001U007p001C00 | 883 |
| | | 04pU004pG004pC007pU004p | | 4pA004pA004pG007pU004pU0 | |
| | | U007pU007pU007pG004pU0 | | 04pA004pC004pA004pA004pA | |
| | | 04pA004pA004pC004pU004p | | 004pA007pG004pC007pA004p | |
| | | U004pG004p001A005p001A0 | | A004pA004pA004pC004p001A | |
| | | 05 | | 004p001G004 | |
| M39 | 3559 | G005p001T005p001U004pU0 | 831 | X033U1027p001U007p001C00 | 884 |
| | | 04pU004pG004pC007pU004p | | 4pA004pA1016pG007pU004pU | |
| | | U007pU007pU007pG004pU0 | | 004pA004pC004pA004pA004p | |
| | | 04pA004pA004pC004pU004p | | A004pA007pG004pC007pA004 | |
| | | U004pG004p001A005p001A0 | | pA004pA004pA004pC004p001 | |
| | | 05 | | A004p001G004 | |
| M40 | 3559 | G005p001T005p001U004pU0 | 832 | X033U1027p001U007p001C00 | 885 |
| | | 04pU004pG004pC007pU004p | | 4pA004pA004pG1016pU004pU | |
| | | U007pU007pU007pG004pU0 | | 004pA004pC004pA004pA004p | |
| | | 04pA004pA004pC004pU004p | | A004pA007pG004pC007pA004 | |
| | | U004pG004p001A005p001A0 | | pA004pA004pA004pC004p001 | |
| | | 05 | | A004p001G004 | |
| M41 | 3559 | G005p001T005p001U004pU0 | 833 | X033U1027p001U007p001C00 | 886 |
| | | 04pU004pG004pC007pU004p | | 4pA004pA004pG007pU1016pU | |
| | | U007pU007pU007pG004pU0 | | 004pA004pC004pA004pA004p | |
| | | 04pA004pA004pC004pU004p | | A004pA007pG004pC007pA004 | |
| | | U004pG004p001A005p001A0 | | pA004pA004pA004pC004p001 | |
| | | 05 | | A004p001G004 | |
| M42 | 3559 | G005p001T005p001U004pU0 | 834 | X033U1027p001U007p001C00 | 887 |
| | | 04pU004pG004pC007pU004p | | 4pA004pA042pG007pU004pU0 | |
| | | U007pU007pU007pG004pU0 | | 04pA004pC004pA004pA004pA | |
| | | 04pA004pA004pC004pU004p | | 004pA007pG004pC007pA004p | |
| | | U004pG004p001A005p001A0 | | A004pA004pA004pC004p001A | |
| | | 05 | | 004p001G004 | |
| M43 | 3559 | G005p001T005p001U004pU0 | 835 | X033U1027p001U007p001C00 | 888 |
| | | 04pU004pG004pC007pU004p | | 4pA004pA004pG042pU004pU0 | |
| | | U007pU007pU007pG004pU0 | | 04pA004pC004pA004pA004pA | |
| | | 04pA004pA004pC004pU004p | | 004pA007pG004pC007pA004p | |
| | | U004pG004p001A005p001A0 | | A004pA004pA004pC004p001A | |
| | | 05 | | 004p001G004 | |
| M44 | 3559 | G005p001T005p001U004pU0 | 836 | X033U1027p001U007p001C00 | 889 |
| | | 04pU004pG004pC007pU004p | | 4pA004pA004pG007pU042pU0 | |
| | | U007pU007pU007pG004pU0 | | 04pA004pC004pA004pA004pA | |
| | | 04pA004pA004pC004pU004p | | 004pA007pG004pC007pA004p | |
| | | U004pG004p001A005p001A0 | | A004pA004pA004pC004p001A | |
| | | 05 | | 004p001G004 | |
| M45 | 3559 | G005p001T005p001U004pU0 | 837 | X033U1027p001U007p001C00 | 890 |
| | | 04pU004pG004pC007pU004p | | 4pA004pA002pG007pU004pU0 | |
| | | U007pU007pU007pG004pU0 | | 04pA004pC004pA004pA004pA | |
| | | 04pA004pA004pC004pU004p | | 004pA007pG004pC007pA004p | |
| | | U004pG004p001A005p001A0 | | A004pA004pA004pC004p001A | |
| | | 05 | | 004p001G004 | |
| M46 | 3559 | G005p001T005p001U004pU0 | 838 | X033U1027p001U007p001C00 | 891 |
| | | 04pU004pG004pC007pU004p | | 4pA004pA004pG002pU004pU0 | |
| | | U007pU007pU007pG004pU0 | | 04pA004pC004pA004pA004pA | |
| | | 04pA004pA004pC004pU004p | | 004pA007pG004pC007pA004p | |
| | | U004pG004p001A005p001A0 | | A004pA004pA004pC004p001A | |
| | | 05 | | 004p001G004 | |
| M47 | 3559 | G005p001T005p001U004pU0 | 839 | X033U1027p001U007p001C00 | 892 |
| | | 04pU004pG004pC007pU004p | | 4pA004pA004pG007pT002pU0 | |
| | | U007pU007pU007pG004pU0 | | 04pA004pC004pA004pA004pA | |
| | | 04pA004pA004pC004pU004p | | 004pA007pG004pC007pA004p | |
| | | U004pG004p001A005p001A0 | | A004pA004pA004pC004p001A | |
| | | 05 | | 004p001G004 | |
| M48 | 3559 | G005p001T005p001U004pU0 | 840 | X033U1027p001U007p001U00 | 893 |
| | | 04pU004pG004pC007pU004p | | 4pA004pA004pG007pU004pU0 | |
| | | U007pU007pU007pG004pU0 | | 04pA004pC004pA004pA004pA | |
| | | 04pA004pA004pC004pU004p | | 004pA007pG004pC007pA004p | |
| | | U004pA004p001A005p001A0 | | A004pA004pA004pC004p001A | |
| | | 05 | | 004p001G004 | |
| M49 | 3559 | G005p001T005p001U004pU0 | 841 | X033U1027p001U007p001U00 | 894 |
| | | 04pU004pG004pC007pU004p | | 4pA004pA004pG007pU004pU0 | |
| | | U007pU007pU007pG004pU0 | | 04pA004pC004pA004pA004pA | |
| | | 04pA004pA004pC004pU004p | | 004pA007pG004pC007pA004p | |
| | | U004pG004p001A005p001A0 | | A004pA004pA004pC004p001A | |
| | | 05 | | 004p001G004 | |
| M50 | 3559 | G005p001T005p001U004pU0 | 842 | X033U1027p001U007p001C04 | 895 |
| | | 04pU004pG004pC007pU004p | | 2pA004pA042pG007pU004pU0 | |
| | | U007pU007pU007pG004pU0 | | 04pA004pC004pA004pA004pA | |
| | | 04pA004pA004pC004pU004p | | 004pA007pG004pC007pA004p | |
| | | U004pG004p001A005p001A0 | | A004pA004pA004pC004p001A | |
| | | 05 | | 004p001G004 | |
| M51 | 3559 | G005p001T005p001U004pU0 | 843 | X033U1027p001U007p001C04 | 896 |
| | | 04pU004pG004pC007pU004p | | 2pA004pA004pG042pU004pU0 | |
| | | U007pU007pU007pG004pU0 | | 04pA004pC004pA004pA004pA | |
| | | 04pA004pA004pC004pU004p | | 004pA007pG004pC007pA004p | |
| | | U004pG004p001A005p001A0 | | A004pA004pA004pC004p001A | |
| | | 05 | | 004p001G004 | |
| M52 | 3559 | G005p001T005p001U004pU0 | 844 | X033U1027p001U007p001C04 | 897 |
| | | 04pU004pG004pC007pU004p | | 2pA004pA004pG007pU042pU0 | |
| | | U007pU007pU007pG004pU0 | | 04pA004pC004pA004pA004pA | |
| | | 04pA004pA004pC004pU004p | | 004pA007pG004pC007pA004p | |
| | | U004pG004p001A005p001A0 | | A004pA004pA004pC004p001A | |
| | | 05 | | 004p001G004 | |
| M53 | 3559 | G005p001T005p001U004pU0 | 845 | X033U1027p001U007p001C00 | 898 |
| | | 04pU004pG004pC007pU004p | | 4pA004pA002pG007pT002pU0 | |
| | | U007pU007pU007pG004pU0 | | 04pA004pC004pA004pA004pA | |
| | | 04pA004pA004pC004pU004p | | 004pA007pG004pC007pA004p | |
| | | U004pG004p001A005p001A0 | | A004pA004pA004pC004p001A | |
| | | 05 | | 004p001G004 | |
| N49 | 3551 | A1039p001C005p001T005pA | 1013 | X033A1032p001C007p001A00 | 1019 |
| | | 004pG004pA004pC004pC007 | | 4pA004pA004pA007pG004pC0 | |
| | | pU004pG007pU007pT002pU0 | | 04pA004pA004pA004pA004pC | |
| | | 04pU004pG004pC004pU004p | | 004pA007pG004pG007pU004p | |
| | | U004pU004pU004p001G005p | | C004pU004pA004pG004p001A | |
| | | 001T005 | | 004p001A004 | |
| N50 | 3551 | A1039p001C005p001T005pA | 1014 | X033A1027p001C007p001A00 | 1020 |
| | | 004pG004pA004pC004pC007 | | 4pA004pA004pA007pG004pC0 | |
| | | pU004pG007pU007pT002pU0 | | 04pA004pA004pA004pA004pC | |
| | | 04pU004pG004pC004pU004p | | 004pA007pG004pG007pU004p | |
| | | U004pU004pU004pG005p001 | | C004pU004pA004pG004p001A | |
| | | T005p001A1039 | | 004p001A004 | |
| N60 | 3551 | C005p001T005p001A004pG0 | 1015 | X033A1027p001C007p001A04 | 1021 |
| | | 04pA004pC004pC007pU004p | | 2pA004pA042pA007pG004pC0 | |
| | | G007pU007pT002pU004pU00 | | 04pA004pA004pA004pA004pC | |
| | | 4pG004pC004pU004pU004pU | | 004pA007pG004pG007pU004p | |
| | | 004pU004p001G005p001T005 | | C004pU004pA004pG004p001A | |
| | | | | 004p001A004 | |
| N61 | 3551 | C005p001T005p001A004pGO | 1016 | X033A1027p001C007p001A04 | 1022 |
| | | 04pA004pC004pC007pU004p | | 2pA004pA004pA042pG004pC0 | |
| | | G007pU007pT002pU004pU00 | | 04pA004pA004pA004pA004pC | |
| | | 4pG004pC004pU004pU004pU | | 004pA007pG004pG007pU004p | |
| | | 004pU004p001G005p001T005 | | C004pU004pA004pG004p001A | |
| | | | | 004p001A004 | |
| N62 | 3551 | C005p001T005p001A004pG0 | 1017 | X033A1027p001C007p001A04 | 1023 |
| | | 04pA004pC004pC007pU004p | | 2pA004pA004pA007pG042pC0 | |
| | | G007pU007pT002pU004pU00 | | 04pA004pA004pA004pA004pC | |
| | | 4pG004pC004pU004pU004pU | | 004pA007pG004pG007pU004p | |
| | | 004pU004p001G005p001T005 | | C004pU004pA004pG004p001A | |
| | | | | 004p001A004 | |
| N63 | 3551 | X2171p001C005p001T005pA | 1018 | X033A1032p001C007p001A00 | 1024 |
| | | 004pG004pA004pC004pC007 | | 4pA004pA004pA007pG004pC0 | |
| | | pU004pG007pU007pT002pU0 | | 04pA004pA004pA004pA004pC | |
| | | 04pU004pG004pC004pU004p | | 004pA007pG004pG007pU004p | |
| | | U004pU004pU004p001G005p | | C004pU004pA004pG004p001A | |
| | | 001T005 | | 004p001A004 | |

[0785] Table A below shows codes in the nucleotide sequences in Table 5 and the following Tables in the disclosure.

TABLE A
p: phosphodiester linkage
p001: phosphorothioate (PS) linkage
SS: sense strand AS: antisense strand
A1039 or X2171: inverted abasic nucleotide

| | |
|---|---|
| A002: 2′-deoxy adenosine (dA) | G002: 2′-deoxy guanosine (dG) |
| A004: adenosine /2′-OMe | G004: guanosine /2′-OMe |
| A005: adenosine /2′-MOE | G005: guanosine /2′-MOE |
| A007: adenosine/2′-F | G007: guanosine/2′-F |
| A042: adenosine TNA | G042: guanosine TNA |
| A1016: adenosine GNA | G1016: guanosine GNA |
| X033A1027: Adenosine /5′-(E)-VP-2′-OMe | X033G1027: guanosine / 5′-(E)-VP-2′-OMe |
| X033A1032: Adenosine /5′-(E)-VP-2′-MOE | |
| C002: 2′-deoxy cytidine (dC) | T002: 2′-deoxy thymidine (dT) |
| C004: cytidine /2′-OMe | U004: uridine /2′-OMe |
| C005: 5-methyl-cytidine /2′-MOE | T005: ribothymidine (5-methyl uridine) /2′-MOE |
| C007: cytidine /2′-F | U007: uridine /2′-F |
| C042: cytidine TNA | U042: uridine TNA |
| C1016: cytosine GNA | U1016: uridine GNA |
| X033C1027: cytidine / 5′-(E)-VP-2′-OMe | X033U1027: uridine / 5′-(E)-VP-2′-OMe |

[0786] The sequences and sequence lists including modified nucleosides (e.g., RNA, RNA modified at a 2′-OH sugar moiety, or RNA modified at a nucleobase) in the disclosure (e.g., Tables 5-9) are indicated with codes defined in Table A unless otherwise indicated. Each code consists of a letter representing a type of the nucleobase, e.g., “A”, “G”, “C”, “U,” or “T” and a numeric code representing a type of modification on a sugar ring.

[0787] For example, if a nucleoside is coded as “T005”, it is meant by a RNA nucleoside including a 2′-MOE ribose sugar moiety and a thymine (or methylated uracil) as “T” indicates a thymine (or methylated uracil) nucleobase and “005” indicates a 2′-MOE substituent at 2′-OH position on the ribose sugar ring.

[0788] In particular example, if a nucleoside is coded as “C005”, it is meant by a RNA nucleoside including a 5-methylated cytosine and a 2′-MOE sugar moiety as “C” indicates a type of specific nucleobase that can exist in combination with a 2′-MOE sugar moiety and “005” indicates a 2′-MOE substituent at 2′-OH position on the ribose sugar ring.

[0789] In another example, if a nucleoside is coded as “A042”, it is meant by a RNA nucleoside including an adenine and a threofuranosyl sugar ring as “A” indicates a type of adenine and “042” indicates a threofuranosyl ring replacing the ribose sugar ring.

[0790] In some embodiments, the dsRNA includes a sense strand having 10 contiguous nucleotides differing by no more than 3 nucleotides from the nucleotide sequence selected from SEQ ID NOs: 793 to 845 and 1013 to 1018. In some embodiments, the dsRNA includes an antisense strand having 10 contiguous nucleotides differing by no more than 3 nucleotides from the nucleotide sequence of SEQ ID NOs: 846 to 898 and 1019 to 1024. In some embodiments, the dsRNA includes a sense strand having 11 contiguous nucleotides differing by no more than 3 nucleotides from the nucleotide sequence selected from SEQ ID NOs: 793 to 845 and 1013 to 1018. In some embodiments, the dsRNA includes an antisense strand having 11 contiguous nucleotides differing by no more than 3 nucleotides from the nucleotide sequence selected from SEQ ID NOs: 846 to 898 and 1019 to 1024. In some embodiments, the dsRNA includes a sense strand having 12 contiguous nucleotides differing by no more than 3 nucleotides from the nucleotide sequence selected from SEQ ID NOs: 793 to 845 and 1013 to 1018. In some embodiments, the dsRNA includes an antisense strand having 12 contiguous nucleotides differing by no more than 3 nucleotides from the nucleotide sequence selected from SEQ ID NOs: 846 to 898 and 1019 to 1024. In some embodiments, the dsRNA includes a sense strand having 13 contiguous nucleotides differing by no more than 3 nucleotides from the nucleotide sequence selected from SEQ ID NOs: 793 to 845 and 1013 to 1018. In some embodiments, the dsRNA includes an antisense strand having 13 contiguous nucleotides differing by no more than 3 nucleotides from the nucleotide sequence selected from SEQ ID NOs: 846 to 898 and 1019 to 1024. In some embodiments, the dsRNA includes a sense strand having 14 contiguous nucleotides differing by no more than 3 nucleotides from the nucleotide sequence selected from SEQ ID NOs: 793 to 845 and 1013 to 1018. In some embodiments, the dsRNA includes an antisense strand having 14 contiguous nucleotides differing by no more than 3 nucleotides from the nucleotide sequence selected from SEQ ID NOs: 846 to 898 and 1019 to 1024. In some embodiments, the dsRNA includes a sense strand having 15 contiguous nucleotides differing by no more than 3 nucleotides from the nucleotide sequence selected from SEQ ID NOs: 793 to 845 and 1013 to 1018. In some embodiments, the dsRNA includes an antisense strand having 15 contiguous nucleotides differing by no more than 3 nucleotides from the nucleotide sequence selected from SEQ ID NOs: 846 to 898 and 1019 to 1024. In some embodiments, the dsRNA includes a sense strand having 16 contiguous nucleotides differing by no more than 3 nucleotides from the nucleotide sequence selected from SEQ ID NOs: 793 to 845 and 1013 to 1018. In some embodiments, the dsRNA includes an antisense strand having 16 contiguous nucleotides differing by no more than 3 nucleotides from the nucleotide sequence selected from SEQ ID NOs: 846 to 898 and 1019 to 1024. In some embodiments, the dsRNA includes a sense strand having 17 contiguous nucleotides differing by no more than 3 nucleotides from the nucleotide sequence selected from SEQ ID NOs: 793 to 845 and 1013 to 1018. In some embodiments, the dsRNA includes an antisense strand having 17 contiguous nucleotides differing by no more than 3 nucleotides from the nucleotide sequence selected from SEQ ID NOs: 846 to 898 and 1019 to 1024. In some embodiments, the dsRNA includes a sense strand having 18 contiguous nucleotides differing by no more than 3 nucleotides from the nucleotide sequence selected from SEQ ID NOs: 793 to 845 and 1013 to 1018. In some embodiments, the dsRNA includes an antisense strand having 18 contiguous nucleotides differing by no more than 3 nucleotides from the nucleotide sequence selected from SEQ ID NOs: 846 to 898 and 1019 to 1024. In some embodiments, the dsRNA includes a sense strand having 19 contiguous nucleotides differing by no more than 3 nucleotides from the nucleotide sequence selected from SEQ ID NOs: 793 to 845 and 1013 to 1018. In some embodiments, the dsRNA includes an antisense strand having 19 contiguous nucleotides differing by no more than 3 nucleotides from the nucleotide sequence selected from SEQ ID NOs: 846 to 898 and 1019 to 1024. In some embodiments, the dsRNA includes a sense strand having 20 contiguous nucleotides differing by no more than 3 nucleotides from the nucleotide sequence selected from SEQ ID NOs: 793 to 845 and 1013 to 1018. In some embodiments, the dsRNA includes an antisense strand having 20 contiguous nucleotides differing by no more than 3 nucleotides from the nucleotide sequence selected from SEQ ID NOs: 846 to 898 and 1019 to 1024. In some embodiments, the dsRNA includes a sense strand having 21 contiguous nucleotides differing by no more than 3 nucleotides from the nucleotide sequence selected from SEQ ID NOs: 793 to 845 and 1013 to 1018. In some embodiments, the dsRNA includes an antisense strand having 21 contiguous nucleotides differing by no more than 3 nucleotides from the nucleotide sequence selected from SEQ ID NOs: 846 to 898 and 1019 to 1024.

[0791] In some embodiments, the dsRNA includes a sense strand having 10 contiguous nucleotides differing by no more than 2 nucleotides from the nucleotide sequence selected from SEQ ID NOs: 793 to 845 and 1013 to 1018. In some embodiments, the dsRNA includes an antisense strand having 10 contiguous nucleotides differing by no more than 2 nucleotides from the nucleotide sequence selected from SEQ ID NOs: 846 to 898 and 1019 to 1024. In some embodiments, the dsRNA includes a sense strand having 11 contiguous nucleotides differing by no more than 2 nucleotides from the nucleotide sequence selected from SEQ ID NOs: 793 to 845 and 1013 to 1018. In some embodiments, the dsRNA includes an antisense strand having 11 contiguous nucleotides differing by no more than 2 nucleotides from the nucleotide sequence selected from SEQ ID NOs: 846 to 898 and 1019 to 1024. In some embodiments, the dsRNA includes a sense strand having 12 contiguous nucleotides differing by no more than 2 nucleotides from the nucleotide sequence selected from SEQ ID NOs: 793 to 845 and 1013 to 1018. In some embodiments, the dsRNA includes an antisense strand having 12 contiguous nucleotides differing by no more than 2 nucleotides from the nucleotide sequence selected from SEQ ID NOs: 846 to 898 and 1019 to 1024. In some embodiments, the dsRNA includes a sense strand having 13 contiguous nucleotides differing by no more than 2 nucleotides from the nucleotide sequence selected from SEQ ID NOs: 793 to 845 and 1013 to 1018. In some embodiments, the dsRNA includes an antisense strand having 13 contiguous nucleotides differing by no more than 2 nucleotides from the nucleotide sequence selected from SEQ ID NOs: 846 to 898 and 1019 to 1024. In some embodiments, the dsRNA includes a sense strand having 14 contiguous nucleotides differing by no more than 2 nucleotides from the nucleotide sequence selected from SEQ ID NOs: 793 to 845 and 1013 to 1018. In some embodiments, the dsRNA includes an antisense strand having 14 contiguous nucleotides differing by no more than 2 nucleotides from the nucleotide sequence selected from SEQ ID NOs: 846 to 898 and 1019 to 1024. In some embodiments, the dsRNA includes a sense strand having 15 contiguous nucleotides differing by no more than 2 nucleotides from the nucleotide sequence selected from SEQ ID NOs: 793 to 845 and 1013 to 1018. In some embodiments, the dsRNA includes an antisense strand having 15 contiguous nucleotides differing by no more than 2 nucleotides from the nucleotide sequence selected from SEQ ID NOs: 846 to 898 and 1019 to 1024. In some embodiments, the dsRNA includes a sense strand having 16 contiguous nucleotides differing by no more than 2 nucleotides from the nucleotide sequence selected from SEQ ID NOs: 793 to 845 and 1013 to 1018. In some embodiments, the dsRNA includes an antisense strand having 16 contiguous nucleotides differing by no more than 2 nucleotides from the nucleotide sequence selected from SEQ ID NOs: 846 to 898 and 1019 to 1024. In some embodiments, the dsRNA includes a sense strand having 17 contiguous nucleotides differing by no more than 2 nucleotides from the nucleotide sequence selected from SEQ ID NOs: 793 to 845 and 1013 to 1018. In some embodiments, the dsRNA includes an antisense strand having 17 contiguous nucleotides differing by no more than 2 nucleotides from the nucleotide sequence selected from SEQ ID NOs: 846 to 898 and 1019 to 1024. In some embodiments, the dsRNA includes a sense strand having 18 contiguous nucleotides differing by no more than 2 nucleotides from the nucleotide sequence selected from SEQ ID NOs: 793 to 845 and 1013 to 1018. In some embodiments, the dsRNA includes an antisense strand having 18 contiguous nucleotides differing by no more than 2 nucleotides from the nucleotide sequence selected from SEQ ID NOs: 846 to 898 and 1019 to 1024. In some embodiments, the dsRNA includes a sense strand having 19 contiguous nucleotides differing by no more than 2 nucleotides from the nucleotide sequence selected from SEQ ID NOs: 793 to 845 and 1013 to 1018. In some embodiments, the dsRNA includes an antisense strand having 19 contiguous nucleotides differing by no more than 2 nucleotides from the nucleotide sequence selected from SEQ ID NOs: 846 to 898 and 1019 to 1024. In some embodiments, the dsRNA includes a sense strand having 20 contiguous nucleotides differing by no more than 2 nucleotides from the nucleotide sequence selected from SEQ ID NOs: 793 to 845 and 1013 to 1018. In some embodiments, the dsRNA includes an antisense strand having 20 contiguous nucleotides differing by no more than 2 nucleotides from the nucleotide sequence selected from SEQ ID NOs: 846 to 898 and 1019 to 1024. In some embodiments, the dsRNA includes a sense strand having 21 contiguous nucleotides differing by no more than 2 nucleotides from the nucleotide sequence selected from SEQ ID NOs: 793 to 845 and 1013 to 1018. In some embodiments, the dsRNA includes an antisense strand having 21 contiguous nucleotides differing by no more than 2 nucleotides from the nucleotide sequence selected from SEQ ID NOs: 846 to 898 and 1019 to 1024.

[0792] In some embodiments, the dsRNA includes a sense strand having 10 contiguous nucleotides differing by no more than 1 nucleotide from the nucleotide sequence selected from SEQ ID NOs: 793 to 845 and 1013 to 1018. In some embodiments, the dsRNA includes an antisense strand having 10 contiguous nucleotides differing by no more than 1 nucleotide from the nucleotide sequence selected from SEQ ID NOs: 846 to 898 and 1019 to 1024. In some embodiments, the dsRNA includes a sense strand having 11 contiguous nucleotides differing by no more than 1 nucleotide from the nucleotide sequence selected from SEQ ID NOs: 793 to 845 and 1013 to 1018. In some embodiments, the dsRNA includes an antisense strand having 11 contiguous nucleotides differing by no more than 1 nucleotide from the nucleotide sequence selected from SEQ ID NOs: 846 to 898 and 1019 to 1024. In some embodiments, the dsRNA includes a sense strand having 12 contiguous nucleotides differing by no more than 1 nucleotide from the nucleotide sequence selected from SEQ ID NOs: 793 to 845 and 1013 to 1018. In some embodiments, the dsRNA includes an antisense strand having 12 contiguous nucleotides differing by no more than 1 nucleotide from the nucleotide sequence selected from SEQ ID NOs: 846 to 898 and 1019 to 1024. In some embodiments, the dsRNA includes a sense strand having 13 contiguous nucleotides differing by no more than 1 nucleotide from the nucleotide sequence selected from SEQ ID NOs: 793 to 845 and 1013 to 1018. In some embodiments, the dsRNA includes an antisense strand having 13 contiguous nucleotides differing by no more than 1 nucleotide from the nucleotide sequence selected from SEQ ID NOs: 846 to 898 and 1019 to 1024. In some embodiments, the dsRNA includes a sense strand having 14 contiguous nucleotides differing by no more than 1 nucleotide from the nucleotide sequence selected from SEQ ID NOs: 793 to 845 and 1013 to 1018. In some embodiments, the dsRNA includes an antisense strand having 14 contiguous nucleotides differing by no more than 1 nucleotide from the nucleotide sequence selected from SEQ ID NOs: 846 to 898 and 1019 to 1024. In some embodiments, the dsRNA includes a sense strand having 15 contiguous nucleotides differing by no more than 1 nucleotide from the nucleotide sequence selected from SEQ ID NOs: 793 to 845 and 1013 to 1018. In some embodiments, the dsRNA includes an antisense strand having 15 contiguous nucleotides differing by no more than 1 nucleotide from the nucleotide sequence selected from SEQ ID NOs: 846 to 898 and 1019 to 1024. In some embodiments, the dsRNA includes a sense strand having 16 contiguous nucleotides differing by no more than 1 nucleotide from the nucleotide sequence selected from SEQ ID NOs: 793 to 845 and 1013 to 1018. In some embodiments, the dsRNA includes an antisense strand having 16 contiguous nucleotides differing by no more than 1 nucleotide from the nucleotide sequence selected from SEQ ID NOs: 846 to 898 and 1019 to 1024. In some embodiments, the dsRNA includes a sense strand having 17 contiguous nucleotides differing by no more than 1 nucleotide from the nucleotide sequence selected from SEQ ID NOs: 793 to 845 and 1013 to 1018. In some embodiments, the dsRNA includes an antisense strand having 17 contiguous nucleotides differing by no more than 1 nucleotide from the nucleotide sequence selected from SEQ ID NOs: 846 to 898 and 1019 to 1024. In some embodiments, the dsRNA includes a sense strand having 18 contiguous nucleotides differing by no more than 1 nucleotide from the nucleotide sequence selected from SEQ ID NOs: 793 to 845 and 1013 to 1018. In some embodiments, the dsRNA includes an antisense strand having 18 contiguous nucleotides differing by no more than 1 nucleotide from the nucleotide sequence selected from SEQ ID NOs: 846 to 898 and 1019 to 1024. In some embodiments, the dsRNA includes a sense strand having 19 contiguous nucleotides differing by no more than 1 nucleotide from the nucleotide sequence selected from SEQ ID NOs: 793 to 845 and 1013 to 1018. In some embodiments, the dsRNA includes an antisense strand having 19 contiguous nucleotides differing by no more than 1 nucleotide from the nucleotide sequence selected from SEQ ID NOs: 846 to 898 and 1019 to 1024. In some embodiments, the dsRNA includes a sense strand having 20 contiguous nucleotides differing by no more than 1 nucleotide from the nucleotide sequence selected from SEQ ID NOs: 793 to 845 and 1013 to 1018. In some embodiments, the dsRNA includes an antisense strand having 20 contiguous nucleotides differing by no more than 1 nucleotide from the nucleotide sequence selected from SEQ ID NOs: 846 to 898 and 1019 to 1024. In some embodiments, the dsRNA includes a sense strand having 21 contiguous nucleotides differing by no more than 1 nucleotide from the nucleotide sequence selected from SEQ ID NOs: 793 to 845 and 1013 to 1018. In some embodiments, the dsRNA includes an antisense strand having 21 contiguous nucleotides differing by no more than 1 nucleotide from the nucleotide sequence selected from SEQ ID NOs: 846 to 898 and 1019 to 1024. In some embodiments, the dsRNA includes an antisense strand having 22 contiguous nucleotides differing by no more than 1 nucleotide from the nucleotide sequence selected from SEQ ID NOs: 846 to 898 and 1019 to 1024. In some embodiments, the dsRNA includes an antisense strand having 23 contiguous nucleotides differing by no more than 1 nucleotide from the nucleotide sequence selected from SEQ ID NOs: 846 to 898 and 1019 to 1024.

[0793] In some embodiments, the dsRNA includes (i) a sense strand having 15 contiguous nucleotides differing by no more than one, two or three nucleotides from the nucleotide sequence selected from SEQ ID NOs: 793 to 845 and 1013 to 1018 and (ii) an antisense strand forming a duplex with the sense strand of (i) and having 15 contiguous nucleotides differing by no more than one, two or three nucleotides from the nucleotide sequence selected from SEQ ID NOs: 846 to 898 and 1019 to 1024. In some embodiments, the dsRNA includes (i) a sense strand having 16 contiguous nucleotides differing by no more than one, two or three from the nucleotide sequence selected from SEQ ID NOs: 793 to 845 and 1013 to 1018 and (ii) an antisense strand forming a duplex with the sense strand of (i) and having 16 contiguous nucleotides differing by no more than one, two or three nucleotides from the nucleotide sequence selected from SEQ ID NOs: 846 to 898 and 1019 to 1024. In some embodiments, the dsRNA includes (i) a sense strand having 17 contiguous nucleotides differing by no more than one, two or three nucleotides from the nucleotide sequence selected from SEQ ID NOs: 793 to 845 and 1013 to 1018 and (ii) an antisense strand forming a duplex with the sense strand of (i) and having 17 contiguous nucleotides differing by no more than one, two or three nucleotides from the nucleotide sequence selected from SEQ ID NOs: 846 to 898 and 1019 to 1024. In some embodiments, the dsRNA includes (i) a sense strand having 18 contiguous nucleotides differing by no more than one, two or three nucleotides from the nucleotide sequence selected from SEQ ID NOs: 793 to 845 and 1013 to 1018 and (ii) an antisense strand forming a duplex with the sense strand of (i) and having 18 contiguous nucleotides differing by no more than one, two or three nucleotides from the nucleotide sequence selected from SEQ ID NOs: 846 to 898 and 1019 to 1024. In some embodiments, the dsRNA includes (i) a sense strand having 19 contiguous nucleotides differing by no more than one, two or three nucleotides from the nucleotide sequence selected from SEQ ID NOs: 793 to 845 and 1013 to 1018 and (ii) an antisense strand forming a duplex with the sense strand of (i) and having 19 contiguous nucleotides differing by no more than one, two or three nucleotides from the nucleotide sequence selected from SEQ ID NOs: 846 to 898 and 1019 to 1024. In some embodiments, the dsRNA includes (i) a sense strand having 20 contiguous nucleotides differing by no more than one, two or three nucleotides from the nucleotide sequence selected from SEQ ID NOs: 793 to 845 and 1013 to 1018 and (ii) an antisense strand forming a duplex with the sense strand of (i) and having 20 contiguous nucleotides differing by no more than one, two or three nucleotides from the nucleotide sequence selected from SEQ ID NOs: 846 to 898 and 1019 to 1024. In some embodiments, the dsRNA includes (i) a sense strand having 21 contiguous nucleotides differing by no more than one, two or three nucleotides from the nucleotide sequence selected from SEQ ID NOs: 793 to 845 and 1013 to 1018 and (ii) an antisense strand forming a duplex with the sense strand of (i) and having 21 contiguous nucleotides differing by no more than one, two or three nucleotides from the nucleotide sequence selected from SEQ ID NOs: 846 to 898 and 1019 to 1024.

[0794] In certain aspects, when a sense strand or an antisense strand of a dsRNA in above paragraphs is differing by a certain number of nucleotides (e.g., one, two or three nucleotides) from a specific sequence (e.g., SEQ ID NOs: 793-898 and 1013-1024), it is meant by that the sense strand or the antisense strand includes one, two or three nucleotides, having different nucleobases and/or different modifications compared to the nucleobases and/or the modifications of the nucleotides at the corresponding positions of the specific sequence (e.g., SEQ ID NOs: 793-898 and 1013-1024). In some embodiments, when a sense strand or an antisense strand is differing by a certain number of nucleotides (e.g., one, two or three nucleotides) from a specific sequence (e.g., SEQ ID NOs: 793-898 and 1013-1024), the sense strand or the antisense strand includes one, two, or three nucleotides, having different nucleobases compared to the nucleobases of the nucleotides at the corresponding positions of the specific sequence (e.g., SEQ ID NOs: 793-898 and 1013-1024). In some embodiments, when a sense strand or an antisense strand is differing by a certain number of nucleotides (e.g., one, two or three nucleotides) from a specific sequence (e.g., SEQ ID NOs: 793-898 and 1013-1024), the sense strand or the antisense strand includes one, two, or three nucleotides, having different modifications compared to the modifications of the nucleotides at the corresponding positions of the specific sequence (e.g., SEQ ID NOs: 793-898 and 1013-1024). In some embodiments, when a sense strand or an antisense strand is differing by a certain number of nucleotides (e.g., one, two or three nucleotides) from a specific sequence (e.g., SEQ ID NOs: 793-898 and 1013-1024), the sense strand or the antisense strand includes one, two, or three nucleotides having different nucleobases and different modifications compared to the nucleobases and the modifications of the nucleotides at the corresponding positions of the specific sequence (e.g., SEQ ID NOs: 793-898 and 1013-1024).

[0795] In certain aspects, when a sense strand or an antisense strand of a dsRNA in above paragraphs is differing by a certain number of nucleotides (e.g., one, two or three nucleotides) from a specific sequence (e.g., SEQ ID NOs: 793-898 and 1013-1024), it is meant by that the sense strand or the antisense strand includes one, two or three nucleotides, having different nucleobases, different modifications, and/or different phosphate linkages (e.g., phosphorothioate (PS)), compared to the nucleobases, the modifications, and/or the phosphate linkages of the nucleotides at the corresponding positions of the specific sequence (e.g., SEQ ID NOs: 793-898 and 1013-1024). In some embodiments, when a sense strand or an antisense strand is differing by a certain number of nucleotides (e.g., one, two or three nucleotides) from a specific sequence (e.g., SEQ ID NOs: 793-898 and 1013-1024), the sense strand or the antisense strand includes one, two, or three nucleotides, having different phosphate linkages compared to the phosphate linkages of the nucleotides at the corresponding positions of the specific sequence (e.g., SEQ ID NOs: 793-898 and 1013-1024). In some embodiments, when a sense strand or an antisense strand is differing by a certain number of nucleotides (e.g., one, two or three nucleotides) from a specific sequence (e.g., SEQ ID NOs: 793-898 and 1013-1024), the sense strand or the antisense strand includes one, two, or three nucleotides, having different nucleobases and different phosphate linkages compared to the nucleobases and the phosphate linkages of the nucleotides at the corresponding positions of the specific sequence (e.g., SEQ ID NOs: 793-898 and 1013-1024). In some embodiments, when a sense strand or an antisense strand is differing by a certain number of nucleotides (e.g., one, two or three nucleotides) from a specific sequence (e.g., SEQ ID NOs: 793-898 and 1013-1024), the sense strand or the antisense strand includes one, two, or three nucleotides, having different modifications and different phosphate linkages compared to the modifications and the phosphate linkages of the nucleotides at the corresponding positions of the specific sequence (e.g., SEQ ID NOs: 793-898 and 1013-1024). In some embodiments, when a sense strand or an antisense strand is differing by a certain number of nucleotides (e.g., one, two or three nucleotides) from a specific sequence (e.g., SEQ ID NOs: 793-898 and 1013-1024), the sense strand or the antisense strand includes one, two, or three nucleotides having different nucleobases, different modifications, and different phosphate linkages compared to the nucleobases, the modifications, and the phosphate linkages of the nucleotides at the corresponding positions of the specific sequence (e.g., SEQ ID NOs: 793-898 and 1013-1024).

[0796] In some embodiments, the dsRNA includes a sense strand comprising SEQ ID NO: 800, and an antisense strand comprising SEQ ID NO: 853.

[0797] In some embodiments, the dsRNA includes a sense strand comprising SEQ ID NO: 801, and an antisense strand comprising SEQ ID NO: 854.

[0798] In some embodiments, the dsRNA includes a sense strand comprising SEQ ID NO: 806, and an antisense strand comprising SEQ ID NO: 859.

[0799] In some embodiments, the dsRNA includes a sense strand comprising SEQ ID NO: 811, and an antisense strand comprising SEQ ID NO: 864.

[0800] In some embodiments, the dsRNA includes a sense strand comprising SEQ ID NO: 813, and an antisense strand comprising SEQ ID NO: 866.

[0801] In some embodiments, the dsRNA includes a sense strand comprising SEQ ID NO: 830, and an antisense strand comprising SEQ ID NO: 883.

### Ligands

[0802] In an aspect, a ligand including the various chemical and biological moieties, such as a small molecule compound, a peptide, an antibody, a carbohydrate, or an additional nucleic acid with or without a linker, can be coupled or conjugated to a dsRNA as described herein. In certain aspects, the ligand may directly (e.g., covalently) conjugated to at least one strand of the dsRNA.

[0803] In certain aspects, the ligand may be conjugated via a linker thereof (e.g., covalent linker) to a sense strand. In some embodiments, the ligand may be conjugated via a linker (e.g., covalent linker, or phosphate or phosphorothioate group) to one or more nucleotides in the sense strand. In some embodiments, the ligand may be conjugated via a linker (e.g., covalent linker, or phosphate or phosphorothioate group) to 5′ end of the sense strand. In some embodiments, the ligand may be conjugated via a linker (e.g., covalent linker, or phosphate or phosphorothioate group) to 3′ end of the sense strand.

[0804] In certain aspects, the ligand may be conjugated via a linker (e.g., covalent linker) to an antisense strand. In some embodiments, the ligand may be conjugated via a linker (e.g., covalent linker, or phosphate or phosphorothioate group) to one or more nucleotides of an antisense strand. In some embodiments, the ligand may be conjugated via a linker (e.g., covalent linker, or phosphate or phosphorothioate group) to 5′ end of an antisense strand. In some embodiments, the ligand may be conjugated via a linker (e.g., covalent linker, or phosphate or phosphorothioate group) to 3′ end of an antisense strand.

[0805] In certain aspects, the linker may be a cleavable chemical moiety which is sufficiently stable outside the cell but which upon is spontaneously and/or irreversibly cleaved to release one or more conjugated groups (e.g., targeting moiety) when introduced in a cell or other physiological conditions (e.g., serum, or blood). In some embodiments, the cleavable linker may include a cleavage site at its terminal part that is attached to other compounds or molecules. In some embodiments, the cleavable linker may include a cleavage site that locates between the two-terminus attached to each different compound or molecule.

[0806] In certain aspects, the linker may be a non-cleavable linker. In certain aspects, the linker may be a hydrolysable linker.

[0807] A choice of the ligand may provide an enhanced affinity and/or delivery of the dsRNA to a specific target biomolecule, cell, tissue, organ compartment, or organ or region of a body. In certain aspects, the ligand may include a targeting moiety or group which bind to a specific organ cell, e.g., liver or kidney cell. In some embodiments, the ligand may include a targeting moiety or group which bind to a specific cell type, e.g., a cancer cell, endothelial cell, or bone cell. In certain aspects, the ligand may include a targeting moiety to hormones and hormone receptors. In certain aspects, the ligand may include a targeting moiety including a lipid component (e.g., short/long chain fatty acid, cationic lipid, lipophilic molecule, cholesterol, steroid, uvaol, hecigenin, diosgenin, terpene, triterpene, sarsasapogenin, friedelin, epifriedelanol-derivatized lithocholic acid, etc.) to modulate or control the binding, to increase resistance to degradation, or to increase targeting or transport into a target cell membrane or cellular lipid vesicles.

[0808] Non limiting examples of ligands may include, but not be limited to, proteins (e.g., thyrotropin, melanotropin, lectin, glycoprotein such as transferrin, or surfactant protein A), carbohydrates (e.g., mucin carbohydrate, multivalent lactose, multivalent galactose, N-acetyl-galactosamine, N-acetyl-glucosamine, multivalent mannose, multivalent fucose, glycosylated polyaminoacids, or multivalent galactose), small molecule drugs (e.g., bisphosphonate), polymers (e.g., PEG (e.g., PEG-40K), MPEG, [MPEG]2, polyglutamate, or polyaspartate), a lipid component (e.g., cholesterol, a steroid, bile acid, cholic acid, adamantane acetic acid, 1-pyrene butyric acid, dihydrotestosterone, 1,3-bis-O(hexadecyl)glycerol, geranyloxyhexyl group, hexadecylglycerol, borneol, menthol, 1,3-propanediol, heptadecyl group, palmitic acid, myristic acid, 03-(oleoyl)lithocholic acid, or 03-(oleoyl)cholenic acid), organic compounds (e.g., dimethoxytrityl, or phenoxazine), vitamins (e.g., folate, vitamin B12, or biotin), small peptides (e.g., antennapedia peptide, TAT peptide, RGD peptide, an RGD peptide mimetic), an additional nucleic acids (e.g., an aptamer), dyes, intercalating agents (e.g., acridines), cross-linkers (e.g., psoralene, mitomycin C), porphyrins (TPPC4, texaphyrin, Sapphyrin), polycyclic aromatic hydrocarbons (e.g., phenazine, dihydrophenazine), artificial endonucleases or a chelator (e.g., EDTA), radiolabeled markers, enzymes, or the like.

[0809] In some embodiments, the ligand may include carbohydrates (e.g., mucin carbohydrate, multivalent lactose, multivalent galactose, N-acetyl-galactosamine, N-acetyl-glucosamine multivalent mannose, multivalent fucose, glycosylated polyaminoacids, or multivalent galactose) as the targeting moiety. In some embodiments, the ligand may include multivalent lactose or multivalent galactose. In some embodiments, the ligand may include N-acetyl-galactosamine as the targeting moiety.

[0810] In certain aspects, the ligand may include one or more diagnostic compound, reporter group, cross-linking agent, nuclease-resistance conferring moiety, modified or unmodified nucleobase, lipophilic molecule, cholesterol, lipid, lectin, steroid, uvaol, hecigenin, diosgenin, terpene, triterpene, sarsasapogenin, friedelin, epifriedelanol-derivatized lithocholic acid, vitamin, carbohydrate, dextran, pullulan, chitin, chitosan, synthetic carbohydrate, oligo lactate (e.g., 15-mer), natural polymer, low- or medium-molecular weight polymer, inulin, cyclodextrin, hyaluronic acid, protein, protein-binding agent, integrin-targeting molecule, polycationic, peptide, polyamine, peptide mimic, and/or transferrin.

[0811] In certain aspects, the ligand targets a specific receptor on a cell (e.g., liver cell or kidney cell). In some embodiments, the ligand targets a cell surface protein, e.g., asialoglycoprotein receptor (ASGPR), which is abundantly expressed on liver cells (hepatocytes). In some embodiments, for targeting ASGPR, the ligand may include one or more selected from carbohydrate (e.g., pyranose such as glucose or its derivatives (e.g., GluNAc), galactose or its derivatives (e.g., GalNAc), mannose or its derivatives (e.g., mannose-6P)). In some embodiments, the ligand may include a sugar cluster containing two or more sugar moieties (e.g., glucose or its derivatives, galactose or its derivatives (e.g., GalNAc), mannose or its derivatives (e.g., m annose-6P), and etc.). In some embodiments, the ligand may include galactose cluster, e.g., GalNAc cluster, or mannose cluster. In some embodiments, the cluster may be formed by linking or coupling the sugar moieties via one or more covalent linkers.

[0812] In certain aspects, the ligand includes one or more GalNAc moieties. In some embodiments, the ligand includes one GalNAc moiety. In some embodiments, the ligand includes two GalNAc moieties. In some embodiments, the ligand includes three GalNAc moieties. In some embodiments, the ligand may include one or more covalent linkers.

[0813] In certain aspects, the ligand has a structure of Formula (A):

[chemical structure]

or a pharmaceutically acceptable salt thereof,
[0814] wherein:
[0815] each L¹ is an independently a linker which may be same or different in each occurrence;
[0816] L² is a linker;
[0817] n is an integer from 1 to 3; and
[0818] [symbol] is an attachment point to the sense strand or the antisense strand, or to a conjugate linker conjugated to the sense strand or the antisense strand.

[0819] In some embodiments, the attachment point is connected to the sense strand or the antisense strand via a direct bond. In some embodiments, the attachment point is connected to the sense strand and the antisense strand via “a conjugate linker” that connects the ligand and one or both strands of dsRNA (e.g., sense strand or antisense strand). In some embodiments, the attachment point is connected to the sense strand and the antisense strand via the conjugate linker that may form a phosphodiester linkage. In some embodiments, the attachment point is connected to the sense strand and the antisense strand via a conjugate linker that may form a phosphorothioate linkage.

[0820] In some embodiments, the attachment point is connected to the sense strand via a phosphodiester linkage at the 3′ end of the sense strand. In some embodiments, the attachment point is connected to the sense strand via a phosphodiester linkage at the 5′ end of the sense strand. In some embodiments, the attachment point is connected to the sense strand via a phosphorothioate group at the 3′ end of the sense strand. In some embodiments, the attachment point is connected to the sense strand via a phosphorothioate group at the 5′ end of the sense strand.

[0821] In some embodiments, the attachment point is connected to the antisense strand via a phosphodiester linkage at the 3′ end of the antisense strand. In some embodiments, the attachment point is connected to the antisense strand via a phosphodiester linkage at the 5′ end of the antisense strand. In some embodiments, the attachment point is connected to the antisense strand via a phosphorothioate group at the 3′ end of the antisense strand. In some embodiments, the attachment point is connected to the antisense strand via a phosphorothioate group at the 5′ end of the antisense strand.

[0822] In certain aspects, each L¹ is independently a covalent linker having the formula -L^{1A}-L^{1B}-L^{1C}-L^{1D}-L^{1E}-. Each L^{1A}, L^{1B}, L^{1C}, L^{1D}, and L^{1E} is independently a bond, —O—P(S)(O)—O—, or —O—P(O)(O)—O—, —O—P(S)(O)—, or —O—P(O)(O)—, a substituted or unsubstituted alkylene (e.g., C₁-C₃₀ alkylene, C₁-C₂₅ alkylene, C₁-C₁₂ or C₁-C₈ alkylene), a substituted or unsubstituted heteroalkylene (e.g., 2 to 30 membered heteroalkylene, 2 to 15 membered heteroalkylene, 2 to 12 membered heteroalkylene, or 2 to 8 membered heteroalkylene), a substituted or unsubstituted cycloalkylene (e.g., C₄-C₁₂ cycloalkylene), a substituted or unsubstituted heterocycloalkylene (e.g., 2 to 30 membered, 2 to 15 membered, or 2 to 12 membered heteroalkylene heterocycloalkylene), substituted or unsubstituted arylene (e.g., C₆-C₁₂ arylene), or a substituted or unsubstituted heteroarylene (e.g., 5 to 6 membered heteroarylene). In some embodiments, each L^{1A}, L^{1B}, L^{1C}, L^{1D}, and L^{1E} is independently a bond, a substituted or unsubstituted alkylene (e.g., C₁-C₃₀, C₁-C₁₅, or C₁-C₁₂ alkylene), a substituted or unsubstituted heteroalkylene (e.g., 2 to 12 membered heteroalkylene), substituted or unsubstituted arylene (e.g., phenylene), or substituted or unsubstituted heteroarylene (e.g., pyridylene). In some embodiments, each L^{1A}, L^{1B}, L^{1C}, L^{1D}, and L^{1E} is independently a bond, unsubstituted C₁-C₁₂ alkylene, —NHC(O)—, —C(O)NH—, —(CH₂)ₐ₁—O—, —O—(CH₂)ₐ₁—, —(CH₂CH₂O)_{b1}—, —(OCH₂CH₂)_{b1}—, —O—P(S)(O)—O—, or —O—P(O)(O)—O—, and each a1 or b1 is independently an integer from 0 to 12.

[0823] In some embodiments, L¹ has the following structure:

[chemical structure]

[0824] or a pharmaceutically acceptable salt thereof,
[0825] wherein:
[0826] each p1, p2, p3, p4, q1, q2, r1, r2, r3 and r4 is independently an integer from 0 to 12;
[0827] W is —OH or —SH; and
[0828] Y is —O— or absent.

[0829] In some embodiments, W is —OH. In some embodiments, W is —SH.

[0830] In some embodiments, Y is —O—. In some embodiments, Y is absent.

[0831] In some embodiments, L¹ has the following structure:

[chemical structure]

[0832] or a pharmaceutically acceptable salt thereof.
[0833] p1, p2, p3, p4, q1, q2, r1, r2, r3, r4, and W are as described above.

[0834] In some embodiments, each p1, p2, p3, p4, q1, q2, r1, r2, r3 and r4 is independently an integer from 1 to 6. In some embodiments, each p1, p2, p3, and p4 is independently 2, 3, 4, 5, 6, or 8. In some embodiments, each q1 and q2 is independently 1, 2, 3, or 4. In some embodiments, each r1, r2, r3 and r4 is independently 1, 2, 3, or 4.

[0835] In certain aspects, the ligand includes the following structures (e.g., GalNAc moiety):

[chemical structure]

[0836] or a pharmaceutically acceptable salt thereof,
[0837] wherein each n1, n2, n3, and n4 is independently an integer from 1 to 3. Y, W, p1, p2, p3, p4, q1, q2, r1, r2, r3, and r4 are as described above, and “*” is an attachment point to L² in Formula (A).

[0838] In some embodiments, n1 is 1. In some embodiments, n1 is 2. In some embodiments, n1 is 3. In some embodiments, n2 is 1. In some embodiments, n2 is 2. In some embodiments, n2 is 3. In some embodiments, n3 is 1. In some embodiments, n3 is 2. In some embodiments, n3 is 3. In some embodiments, n4 is 1. In some embodiments, n4 is 2. In some embodiments, n4 is 3.

[0839] In some embodiments, the ligand includes the following structure:

[chemical structure]

[chemical structure]

[0840] or a pharmaceutically acceptable salt thereof,
[0841] wherein L², Y, W, p1, p2, p3, p4, q1, q2, r1, r2, r3, and r4 are as described above and
[0842] [symbol] is an attachment point to the sense strand or the antisense strand, or to a conjugate linker conjugated to the sense strand or the antisense strand.

[0843] In certain aspects, L² is a covalent linker of the formula -L^{2A}-L^{2B}-L^{2C}-L^{2D}-L^{2E}-. Each L^{2A}, L^{2B}, L^{2C}, L^{2D}, and L^{2E} a bond, —O—P(S)(O)—O—, —O—P(O)(O)—O—, —O—P(S)(O)—, or —O—P(O)(O)—, a substituted or unsubstituted alkylene (e.g., C₁-C₃₀ alkylene, C₁-C₂₅ alkylene, C₁-C₁₂ or C₁-C₈ alkylene), a substituted or unsubstituted heteroalkylene (e.g., 2 to 30 membered heteroalkylene, 2 to 15 membered heteroalkylene, 2 to 12 membered heteroalkylene, or 2 to 8 membered heteroalkylene), a substituted or unsubstituted cycloalkylene (e.g., C₄-C₁₂ cycloalkylene), a substituted or unsubstituted heterocycloalkylene (e.g., 5 to 6 membered heterocycloalkylene), substituted or unsubstituted arylene (e.g., phenylene), or a substituted or unsubstituted heteroarylene (e.g., 5 to 6 membered heteroarylene). In some embodiments, each L^{2A}, L^{2B}, L^{2C}, L^{2D}, and L^{2E} is independently a bond, substituted or unsubstituted alkylene (e.g., C₁-C₃₀ alkylene, C₁-C₂₅ alkylene, C₁-C₁₂ or C₁-C₈ alkylene), a substituted or unsubstituted heteroalkylene (e.g., 2 to 30 membered, 2 to 15 membered, or 2 to 12 membered heteroalkylene heteroalkylene), or a substituted or unsubstituted heterocycloalkylene (e.g., 5 to 6 membered heterocycloalkylene). In some embodiments, each L^{2A}, L^{2B}, L^{2C}, L^{2D}, and L^{2E} is independently a bond, substituted (e.g., OH-substituted) or unsubstituted C₁-C₁₂ alkylene, —NHC(O)—, —C(O)NH—, —(CH₂)ₐ₂—O—, —O—(CH₂)ₐ₂—, —(CH₂CH₂O)_{b2}—, —(OCH₂CH₂)_{b2}—, —O—P(S)(O)—O—, —O—P(O)(O)—O—, —O—P(S)(O)—, or —O—P(O)(O)—, substituted or unsubstituted cycloalkylene (e.g., cyclohexylene), substituted or unsubstituted heterocycloalkylene (e.g., pyrrolidinyl, pyrazolinyl, pyrazolidinyl, imidazolinyl, imidazolidinyl, piperidinyl, piperazinyl, [1,3]dioxolane, oxazolidinyl, isoxazolidinyl, morpholinyl, thiazolidinyl, isothiazolidinyl, quinoxalinyl, pyridazinonyl, tetrahydrofuryl and decalin) or substituted or unsubstituted arylene (e.g., phenylene). Each a2 or b2 is independently an integer from 1 to 12.

[0844] In some embodiments, L^{2A} is —NHC(O)—, or —C(O)NH—. In some embodiments, L^{2A} is —NHC(O)—.

[0845] In some embodiments, L^{2D} is

[chemical structure]

In some embodiments, L^{2D} is

[chemical structure]

In some embodiments, L^{2D} is

[chemical structure]

In some embodiments, L^{2D} is

[chemical structure]

In some embodiments, L^{2D} is

[chemical structure]

In some embodiments, L^{2D} is —O— or —S—.

[0846] In some embodiments, L^{2E} is a bond. In some embodiments, L^{2E} is —O— or —S—. In some embodiments, L^{2E} is

[chemical structure]

In some embodiments, L^{2E} is

[chemical structure]

In some embodiments, L^{2E} is

[chemical structure]

In some embodiments, L^{2E} is

[chemical structure]

In some embodiments, L^{2E} is

[chemical structure]

In some embodiments,

[chemical structure]

In some embodiments, L^{2E} is

[chemical structure]

[0847] In some embodiments, the ligand includes the following structures (B-1) to (B-6):

[chemical structure]

[0848] or a pharmaceutically acceptable salt thereof,
[0849] wherein each s1, t1, and u1 is independently an integer from 1 to 12, and R¹⁰⁰ is a hydrogen or a substituent (e.g., a side chain of a natural or unnatural amino acid). p1, q1, r1, and b2 are as described above.

[0850] Additional suitable ligands related to the above structures of Formula (B) and its subordinates and synthesis thereof are also described in WO2009/082607, entire contents of which are incorporated herein by reference.

[0851] In some embodiments, Y is —O—. In some embodiments, Y is absent.

[0852] In some embodiments, the ligand includes the following structures (C-1) to (C-3):

[chemical structure]

[0853] or a pharmaceutically acceptable salt thereof,
   wherein each s2 and t2 is independently an integer from 1 to 12. p2, q2, and r2 are as described above.

[0854] Additional suitable ligands related to the above structures of Formula (C) and its subordinates and synthesis thereof are also described in WO2018/191278, entire contents of which are incorporated herein by reference.

[0855] In some embodiments, the ligand includes the following structure (D):

[chemical structure]

[0856] or a pharmaceutically acceptable salt thereof,
[0857] wherein each s3 and t3 is independently an integer from 1 to 12. p3 and r3 are as described above.

[0858] Additional suitable ligands related to the above structure of Formula (D) and its subordinates and synthesis thereof are also described in WO2014/179620, entire contents of which are incorporated herein by reference.

[0859] In some embodiments, the ligand includes the following structure (E-1) to (E-2):

[chemical structure]

[0860] or a pharmaceutically acceptable salt thereof,
[0861] wherein each s4 is independently an integer from 1 to 12. W, p4, and r4 are as described above, a2 is 3 or 4, and [symbol] is an attachment point to the sense strand or the antisense strand, or to a conjugate linker conjugated to the sense strand or the antisense strand.

[0862] In some embodiments, at least one of W is —SH. In some embodiments, at least one of W is —OH.

[0863] Additional suitable ligands related to the above structure of Formula (E) and its subordinates and synthesis thereof are also described in WO2017/174657, entire contents of which are incorporated herein by reference.

[0864] In some embodiments, the ligand includes the following structures:

[chemical structure]

[chemical structure]

[chemical structure]

[chemical structure]

[chemical structure]

[chemical structure]

[0865] or a pharmaceutically acceptable salt thereof,
[0866] wherein [symbol] is an attachment point to the sense strand or the antisense strand, or to a conjugate linker conjugated to the sense strand or the antisense strand.

[0867] In some embodiments, the ligand has the following structure:

[chemical structure]

or a pharmaceutically acceptable salt thereof,
[0868] wherein [symbol] is an attachment point to the sense strand or the antisense strand, or to a conjugate linker conjugated to the sense strand or the antisense strand.

[0869] In some embodiments, the ligand has the following structure:

[chemical structure]

or a pharmaceutically acceptable salt thereof,
[0870] wherein [symbol] is an attachment point to the sense strand or the antisense strand, or to a conjugate linker conjugated to the sense strand or the antisense strand.

[0871] In certain aspects, the ligand has a structure of Formula (F):

[chemical structure]

or a pharmaceutically acceptable salt thereof,
[0872] wherein:
[0873] each L¹¹, L¹², L¹³, L¹⁴, and L¹⁵ is an independently a linker;
[0874] L² is a linker as described above;
[0875] [symbol] is an attachment point to the sense strand or the antisense strand, or to a conjugate linker conjugated to the sense strand or the antisense strand.

[0876] In some embodiments, each L11 is independently a covalent linker having the formula -L11A-L11B-L11C-L11D-L11E-. Each L11A, L11B, L11C, L11D, and L11E is independently a bond, substituted or unsubstituted alkylene, or a substituted or unsubstituted heteroalkylene. In some embodiments, each L11A, L11B, L11C, L11D, and L11E is independently a bond, substituted or unsubstituted alkylene (e.g., C1-C30, C1-C15, or C1-C12 alkylene), or a substituted or unsubstituted heteroalkylene (e.g., 2 to 30, 2 to 15 membered, or 2 to 12 membered heteroalkylene. In some embodiments, each L11A, L11B, L11C, L11D, and L11E is independently a bond, unsubstituted C11-C112 alkylene, —NHC(O)—, —C(O)NH—, —(CH2)a11-O—, —O—(CH2)a11-, —(CH2CH2O)b11-, or —(OCH2CH2)b11-, and each a11 or b11 is independently an integer from 0 to 12.

[0877] In some embodiments, each L¹² is independently a covalent linker having the formula -L^{12A}-L^{12B}-L^{12C}-L^{12D}-L^{12E}-. Each L^{12A}, L^{12B}, L^{12C}, L^{12D}, and L^{12E} is independently a bond, substituted or unsubstituted alkylene, or a substituted or unsubstituted heteroalkylene. In some embodiments, each L^{12A}, L^{12B}, L^{12C}, L^{12D}, and L^{12E} is independently a bond, substituted or unsubstituted alkylene (e.g., C₁-C₃₀, C₁-C₁₅, or C₁-C₁₂ alkylene), or a substituted or unsubstituted heteroalkylene (e.g., 2 to 30, 2 to 15 membered, or 2 to 12 membered heteroalkylene. In some embodiments, each L^{12A}, L^{12B}, L^{12C}, L^{12D}, and L^{12E} is independently a bond, unsubstituted C₁₂-C₁₂₂ alkylene, —NHC(O)—, —C(O)NH—, —(CH₂)ₐ₁₂—O—, —O—(CH₂)ₐ₁₂—, —(CH₂CH₂O)_{b12}—, or —(OCH₂CH₂)_{b12}—, and each a12 or b12 is independently an integer from 0 to 12.

[0878] In some embodiments, each L13 is independently a covalent linker having the formula -L13A-L13B-L13C-L13D-L13E-. Each L13A, L13B, L13C, L13D, and L13E is independently a bond, substituted or unsubstituted alkylene, or a substituted or unsubstituted heteroalkylene. In some embodiments, each L13A, L13B, L13C, L13D, and L13E is independently a bond, substituted or unsubstituted alkylene (e.g., C1-C30, C1-C15, or C1-C12 alkylene), or a substituted or unsubstituted heteroalkylene (e.g., 2 to 30, 2 to 15 membered, or 2 to 12 membered heteroalkylene. In some embodiments, each L13A, L13B, L13C, L13D, and L13E is independently a bond, unsubstituted C1a14-C12 alkylene, —NHC(O)—, —C(O)NH—, —(CH2)a13-O—, —O—(CH2)a13-, —(CH2CH2O)b13-, or —(OCH2CH2)b13-, and each a13 or b13 is independently an integer from 0 to 12.

[0879] In some embodiments, L¹⁴ has the formula -L^{14A}-L^{14B}-L^{14C}-L^{14D}-L^{14E}-. Each L^{14A}, L^{14B} L^{14C}, L^{14D}, and L^{14E} is independently a bond, substituted or unsubstituted alkylene, or a substituted or unsubstituted heteroalkylene. In some embodiments, each L^{14A}, L^{14B}, L^{14C}, L^{14D}, and L^{14E} is independently a bond, unsubstituted C₁-C₁₂ alkylene, —NHC(O)—, —C(O)NH—, —(CH₂)ₐ₁₄—O—, —O—(CH₂)ₐ₁₄—, —(CH₂CH₂O)_{b14}—, or —(OCH₂CH₂)_{b14}—, and each a14 or b14 is independently an integer from 0 to 12. In some embodiments, L¹⁴ is a bond. In some embodiments, L¹⁴ is unsubstituted C₁-C₁₂ alkylene. In some embodiments, L¹⁴ is —C(O)NH—(CH₂)z1, or —NHC(O)—(CH₂)z1 wherein z1 is an integer from 0 to 12.

[0880] In some embodiments, L¹⁵ has the formula -L^{15A}-L^{15B}-L^{15C}-L^{15D}-L^{15E}-. Each L^{15A}, L^{15B}, L^{15C}, L^{15D}, and L^{15E} is independently a bond, substituted or unsubstituted alkylene, or a substituted or unsubstituted heteroalkylene. In some embodiments, each L^{15A}, L^{15B}, L^{15C}, L^{15D}, and L^{15E} is independently a bond, unsubstituted C₁-C₁₂ alkylene, —NHC(O)—, —C(O)NH—, —(CH₂)ₐ₁₅—O—, —O—(CH₂)ₐ₁₅—, —(CH₂CH₂O)_{b15}—, or —(OCH₂CH₂)_{b15}—, and each a15 or b15 is independently an integer from 0 to 12. In some embodiments, L¹⁵ is unsubstituted C₁-C₁₂ alkylene. In some embodiments, L¹⁵ is —C(O)NH—(CH₂)z2, or —NHC(O)—(CH₂)z2 wherein z2 is an integer from 0 to 12. In some embodiments, L¹⁵ is —C(O)NH— or —NHC(O)—.

[0881] In certain aspects, the ligand includes the following structure:

[chemical structure]

[0882] or a pharmaceutically acceptable salt thereof,
[0883] wherein:
[0884] L² is as described above;
[0885] each p11 and q11 is independently an integer from 0 to 12;
[0886] each z1, z2, and z3 is independently an integer of 0 to 12; and
[0887] [symbol] is an attachment point to the sense strand or the antisense strand, or to a conjugate linker conjugated to the sense strand or the antisense strand.

[0888] In some embodiments, the ligand includes the following structures (F-1-a) to (F-1-c):

[chemical structure]

[0889] or a pharmaceutically acceptable salt thereof,
[0890] wherein W, p2, q2, z1, z2, and z3 are as described above. z4 is an integer from 0 to 10.

[0891] In some embodiments, the ligand includes the following structures (F-2-a) to (F-2-c):

[chemical structure]

[0892] or a pharmaceutically acceptable salt thereof,
[0893] wherein W, p2, q2, z1, z2 and z3 are as described above. z4 is an integer from 0 to 10.

[0894] In some embodiments, z1 is 0. In some embodiments, z1 is 1. In some embodiments, z1 is 2. In some embodiments, z1 is 3. In some embodiments, z1 is 4. In some embodiments, z2 is 0. In some embodiments, z2 is 1. In some embodiments, z2 is 2. In some embodiments, z2 is 3. In some embodiments, z2 is 4. In some embodiments, z3 is 0. In some embodiments, z3 is 1. In some embodiments, z3 is 2. In some embodiments, z3 is 3. In some embodiments, z3 is 4.

[0895] In some embodiments, the ligand includes the following structure:

[chemical structure]

[0896] or a pharmaceutically acceptable salt thereof.

[0897] Additional suitable ligands related to the above structures of Formula (F) and its subordinates and synthesis thereof are also described in WO2011/104169 and WO2008/022309, entire contents of which are incorporated herein by reference.

[0898] In some embodiments, the ligand is coupled or conjugated to the 3′ end of the sense strand. In some embodiments, the ligand is coupled or conjugated to the 5′ end of the sense strand. In some embodiments, the ligand is coupled or conjugated to the 3′ end of the antisense strand. In some embodiments, the ligand is coupled or conjugated to the 5′ end of the antisense strand. In some embodiments, two ligands may be coupled to both sense strand and antisense strand. In some embodiments, the ligand is conjugated to a “non-end” of the sense strand or antisense strand.

[0899] In some embodiments, the ligands may be conjugated to the 3′ end of the sense strand and to the 3′ end of the antisense strand. In some embodiments, the ligands may be conjugated to the 5′ end of the sense strand and to the 3′ end of the antisense strand. In some embodiments, the ligands may be conjugated to a non-end of the sense strand and to the 3′ end of the antisense strand. In some embodiments, the ligands may be conjugated to the 3′ end of the sense strand and to a non-end of the antisense strand. In some embodiments, the ligands may be conjugated to the 5′ end of the sense strand and to a non-end of the antisense strand. In some embodiments, the ligands may be conjugated to a non-end of the sense strand and to a non-end of the antisense strand (e.g., nucleobases).

[0900] In some embodiments, the dsRNAi agent includes the following structure:

[chemical structure]

or a pharmaceutically acceptable salt thereof,
[0901] wherein W is —OH or —SH.

[0902] In some embodiments, the dsRNAi agent includes the following structure:

[chemical structure]

or a pharmaceutically acceptable salt thereof,
[0903] wherein W is —OH or —SH, and the sense strand includes any one of the sense strand selected from SEQ ID NOs: 3-381, 761-776, 793-845 and 1013-1018.

[0904] In some embodiments, the RNAi agent includes the following structure:

[chemical structure]

or a pharmaceutically acceptable salt thereof,
[0905] wherein W is —OH or —SH.

[0906] In some embodiments, the RNAi agent includes the following structure:

[chemical structure]

or a pharmaceutically acceptable salt thereof,
[0907] wherein W is —OH or —SH, and the sense strand includes any one of the sense strand selected from SEQ ID NOs: 3-381, 761-776, 793-845 and 1013-1018.

[0908] In some embodiments, the RNAi agent includes the following structure:

[chemical structure]

or a pharmaceutically acceptable salt thereof,
[0909] wherein W is —OH or —SH.

[0910] In some embodiments, the RNAi agent includes the following structure:

[chemical structure]

or a pharmaceutically acceptable salt thereof,
[0911] wherein W is —OH or —SH, and the antisense strand includes any one of the antisense strand selected from SEQ ID NOs: 382-760, 777-792, 846-898 and 1019-1024.

[0912] In some embodiments, the RNAi agent includes the following structure:

[chemical structure]

or a pharmaceutically acceptable salt thereof,
[0913] wherein W is —OH or —SH.

[0914] In some embodiments, the RNAi agent includes the following structure:

[chemical structure]

or a pharmaceutically acceptable salt thereof,
[0915] wherein W is —OH or —SH and the antisense strand includes any one of the antisense strand selected from SEQ ID NOs: 382-760, 777-792, 846-898 and 1019-1024.

[0916] In some embodiments, the RNAi agent includes the following structure:

[chemical structure]

or a pharmaceutically acceptable salt thereof,
[0917] wherein W is —OH or —SH.

[0918] In some embodiments, the RNAi agent includes the following structure:

[chemical structure]

or a pharmaceutically acceptable salt thereof,
[0919] wherein W is —OH or —SH and the sense strand includes any one of the sense strand selected from SEQ ID NOs: 3-381, 761-776, 793-845 and 1013-1018.

[0920] In some embodiments, the RNAi agent includes the following structure:

[chemical structure]

or a pharmaceutically acceptable salt thereof,
[0921] wherein W is —OH or —SH.

[0922] In some embodiments, the RNAi agent includes the following structure:

[chemical structure]

or a pharmaceutically acceptable salt thereof,
[0923] wherein W is —OH or —SH and the sense strand includes any one of the sense strand selected from SEQ ID NOs: 3-381, 761-776, 793-845 and 1013-1018.

[0924] In some embodiments, the RNAi agent includes the following structure:

[chemical structure]

or a pharmaceutically acceptable salt thereof, wherein W is —OH or —SH.

[0925] In some embodiments, the RNAi agent includes the following structure:

[chemical structure]

or a pharmaceutically acceptable salt thereof,
[0926] wherein W is —OH or —SH and the antisense strand includes any one of the antisense strand selected from SEQ ID NOs: 382-760, 777-792, 846-898 and 1019-1024.

[0927] In some embodiments, the RNAi agent includes the following structure:

[chemical structure]

or a pharmaceutically acceptable salt thereof,
[0928] wherein W is —OH or —SH.

[0929] In some embodiments, the RNAi agent includes the following structure:

[chemical structure]

or a pharmaceutically acceptable salt thereof,
[0930] wherein W is —OH or —SH and the antisense strand includes any antisense strand selected from SEQ ID NOs: 382-760, 777-792, 846-898 and 1019-1024.

[0931] In some embodiments, the RNAi agent includes the following structure:

[chemical structure]

or a pharmaceutically acceptable salt thereof,
[0932] wherein W is —OH or —SH.

[0933] In some embodiments, the RNAi agent includes the following structure:

[chemical structure]

or a pharmaceutically acceptable salt thereof,
[0934] wherein W is —OH or —SH and the sense strand includes any one of the sense strand selected from SEQ ID NOs: 3-381, 761-776, 793-845 and 1013-1018.

[0935] In some embodiments, the RNAi agent includes the following structure:

[chemical structure]

or a pharmaceutically acceptable salt thereof,
[0936] wherein W is —OH or —SH.

[0937] In some embodiments, the RNAi agent includes the following structure:

[chemical structure]

or a pharmaceutically acceptable salt thereof,
[0938] wherein W is —OH or —SH and the sense strand includes any one of the sense strand selected from SEQ ID NOs: 3-381, 761-776, 793-845 and 1013-1018.

[0939] In some embodiments, the RNAi agent includes the following structure:

[chemical structure]

or a pharmaceutically acceptable salt thereof,
[0940] wherein W is —OH or —SH.

[0941] In some embodiments, the RNAi agent includes the following structure:

[chemical structure]

or a pharmaceutically acceptable salt thereof,
[0942] wherein W is —OH or —SH and the antisense strand includes any one of the antisense strand selected from SEQ ID NOs: 382-760, 777-792, 846-898 and 1019-1024.

[0943] In some embodiments, the RNAi agent includes the following structure:

[chemical structure]

or a pharmaceutically acceptable salt thereof,
[0944] wherein W is —OH or —SH.

[0945] In some embodiments, the RNAi agent includes the following structure:

[chemical structure]

or a pharmaceutically acceptable salt thereof,
[0946] wherein W is —OH or —SH and the antisense strand includes any one of the antisense strand selected from SEQ ID NOs: 382-760, 777-792, 846-898 and 1019-1024.

[0947] In some embodiments, the RNAi agent includes the following structure:

[chemical structure]

or a pharmaceutically acceptable salt thereof,
[0948] wherein W is —OH or —SH.

[0949] In some embodiments, the RNAi agent includes the following structure:

[chemical structure]

or a pharmaceutically acceptable salt thereof,
[0950] wherein W is —OH or —SH and the sense strand includes any one of the sense strand selected from SEQ ID NOs: 3-381, 761-776, 793-845 and 1013-1018.

[0951] In some embodiments, the RNAi agent includes the following structure:

[chemical structure]

or a pharmaceutically acceptable salt thereof,
[0952] wherein W is —OH or —SH.

[0953] In some embodiments, the RNAi agent includes the following structure:

[chemical structure]

or a pharmaceutically acceptable salt thereof,
[0954] wherein W is —OH or —SH and the sense strand includes any one of the sense strand selected from SEQ ID NOs: 3-381, 761-776, 793-845 and 1013-1018.

[0955] In some embodiments, the RNAi agent includes the following structure:

[chemical structure]

or a pharmaceutically acceptable salt thereof,
[0956] wherein W is —OH or —SH.

[0957] In some embodiments, the RNAi agent includes the following structure:

[chemical structure]

or a pharmaceutically acceptable salt thereof,
[0958] wherein W is —OH or —SH and the antisense strand includes any one of the antisense strand selected from SEQ ID NOs: 382-760, 777-792, 846-898 and 1019-1024.

[0959] In some embodiments, the RNAi agent includes the following structure:

[chemical structure]

or a pharmaceutically acceptable salt thereof,
[0960] wherein W is —OH or —SH.

[0961] In some embodiments, the RNAi agent includes the following structure:

[chemical structure]

or a pharmaceutically acceptable salt thereof,
[0962] wherein W is —OH or —SH, and the antisense strand includes any one of the antisense strand selected from SEQ ID NOs: 382-760, 777-792, 846-898 and 1019-1024.

[0963] In some embodiments, W is —OH. In some embodiments, W is —SH.

[0964] In certain aspects, the ligand may further include an inverted abasic deoxyribonucleotide (invAb) that may be connected to the sense strand or antisense strand. In some embodiments, the ligand comprises, for example, the following structure:

[chemical structure]

[chemical structure]

or a pharmaceutically acceptable salt thereof,
[0965] wherein W is —OH or —SH, and [symbol] is an attachment point to the sense strand or the antisense strand, or to a conjugate linker conjugated to the sense strand or the antisense strand.

[0966] In some embodiments, W is —OH. In some embodiments, W is —SH.

[0967] In certain aspects, the ligand as described above may direct the dsRNAi to a specific cell or tissue, e.g., liver cells. In some embodiments, the ligand may direct the dsRNAi to a liver cell.

[0968] Examples of PCKS9 targeting dsRNAi agent including the liver targeting ligand (e.g., XC2000 or L96) are listed in Table 6.

TABLE 6

| | Site | | | | |
|---|---|---|---|---|---|
| | of | | SEQ | | SEQ |
| SiRNA | mRNA | | ID | | ID |
| No. | target | Sense strand - modified | NO. | Antisense strand - modified | NO. |
| D1 | 3551 | C004p001U004p001A004pG0 | 899 | A004p001C007p001A004pA00 | 956 |
| | | 04pA004pC004pC007pU004p | | 7pA007pA007pG004pC007pA0 | |
| | | G007pU004pT002pU004pU00 | | 04pA007pA004pA007pC004pA | |
| | | 4pG004pC004pU004pU004pU | | 007pG004pG007pU004pC007p | |
| | | 004pU004pG004pU004pX200 | | U004pA004pG004p001A004p0 | |
| | | 0 | | 01A004 | |
| D2 | 3551 | C004p001U004p001A004pG0 | 900 | | |
| | | 04pA004pC004pC007pU004p | | 4pA004pA007pG004pC004pA0 | |
| | | G007pU007pT002pU004pU00 | | 04pA004pA004pA004pC004pA | |
| | | 4pG004pC004pU004pU004pU | | 007pG004pG007pU004pC004p | |
| | | 004pU004pG004pU004pX200 | | U004pA004pG004p001A004p0 | |
| | | 0 | | 01A004 | |
| D3 | 3551 | C004p001U004p001A004pG0 | 901 | X033A1027p001C007p001A00 | 958 |
| | | 04pA004pC004pC007pU004p | | 4pA004pA004pA007pG004pC0 | |
| | | G007pU007pT002pU004pU00 | | 04pA004pA004pA004pA004pC | |
| | | 4pG004pC004pU004pU004pU | | 004pA007pG004pG007pU004p | |
| | | 004pU004pG004pU004pX200 | | C004pU004pA004pG004p001A | |
| | | 0 | | 004p001A004 | |
| D4 | 3551 | C005p001T005p001A004pGO | 902 | X033A1027p001C007p001A00 | 959 |
| | | 04pA004pC004pC007pU004p | | 4pA004pA004pA007pG004pC0 | |
| | | G007pU007pT002pU004pU00 | | 04pA004pA004pA004pA004pC | |
| | | 4pG004pC004pU004pU004pU | | 004pA007pG004pG007pU004p | |
| | | 004pU004pG005pT005pX200 | | C004pU004pA004pG004p001A | |
| | | 0 | | 004p001A004 | |
| D5 | 3551 | C005p001T005p001A004pG0 | 903 | A004p001C007p001A004pA00 | 960 |
| | | 04pA004pC004pC007pU004p | | 4pA004pA007pG004pC004pA0 | |
| | | G007pU007pT002pU004pU00 | | 04pA004pA004pA004pC004pA | |
| | | 4pG004pC004pU004pU004pU | | 007pG004pG007pU004pC004p | |
| | | 004pU004pG005pT005pX200 | | U004pA004pG004p001A004p0 | |
| | | 0 | | 01A004 | |
| D6 | 3551 | C005p001T005p001A004pG0 | 904 | X033U1027p001C007p001A00 | 961 |
| | | 04pA004pC004pC007pU004p | | 4pA004pA004pA007pG004pC0 | |
| | | G007pU007pT002pU004pU00 | | 04pA004pA004pA004pA004pC | |
| | | 4pG004pC004pU004pU004pU | | 004pA007pG004pG007pU004p | |
| | | 004pU004pG005pA005pX200 | | C004pU004pA004pG004p001A | |
| | | 0 | | 005p001A005 | |
| D7 | 3551 | C004p001U004p001A004pG0 | 905 | A004p001C007p001A004pA00 | 962 |
| (D1- | | 04pA004pC004pC007pU004p | | 7pA007pA007pG004pC007pA0 | |
| 1) | | G007pU004pT002pU004pU00 | | 04pA007pA004pA007pC004pA | |
| | | 4pG004pC004pU004pU004pU | | 007pG004pG007pU004pC007p | |
| | | 004pU004pG004pU004pX108 | | U004pA004pG004p001A004p0 | |
| | | 5 | | 01A004 | |
| D8 | 3551 | C005p001T005p001A004pG0 | 906 | X033A1027p001C007p001A00 | 963 |
| (D4- | | 04pA004pC004pC007pU004p | | 4pA004pA004pA007pG004pC0 | |
| 1) | | G007pU007pT002pU004pU00 | | 04pA004pA004pA004pA004pC | |
| | | 4pG004pC004pU004pU004pU | | 004pA007pG004pG007pU004p | |
| | | 004pU004pG005pT005pX108 | | C004pU004pA004pG004p001A | |
| | | 5 | | 004p001A004 | |
| D9 | 3551 | C005p001T005p001A004pG0 | 907 | A004p001C007p001A004pA00 | 964 |
| (D5- | | 04pA004pC004pC007pU004p | | 4pA004pA007pG004pC004pA0 | |
| 1) | | G007pU007pT002pU004pU00 | | 04pA004pA004pA004pC004pA | |
| | | 4pG004pC004pU004pU004pU | | 007pG004pG007pU004pC004p | |
| | | 004pU004pG005pT005pX108 | | U004pA004pG004p001A004p0 | |
| | | 5 | | 01A004 | |
| D10 | 3551 | C004p001U004p001A004pG0 | 908 | X033A1027p001C007p001A00 | 965 |
| (D3- | | 04pA004pC004pC007pU004p | | 4pA004pA004pA007pG004pC0 | |
| 1) | | G007pU007pT002pU004pU00 | | 04pA004pA004pA004pA004pC | |
| | | 4pG004pC004pU004pU004pU | | 004pA007pG004pG007pU004p | |
| | | 004pU004pG004pU004pX108 | | C004pU004pA004pG004p001A | |
| | | 5 | | 004p001A004 | |
| D11 | 3551 | C005p001T005p001A004pG0 | 909 | X033U1027p001C007p001A00 | 966 |
| | | 04pA004pC004pC007pU004p | | 4pA004pA004pA007pG004pC0 | |
| | | G007pU007pT002pU004pU00 | | 04pA004pA004pA004pA004pC | |
| | | 4pG004pC004pU004pU004pU | | 004pA007pG004pG007pU004p | |
| | | 004pU004pG005pA005pX200 | | C004pU004pA004pG004p001A | |
| | | 0 | | 004p001A004 | |
| D12 | 3551 | C005p001T005p001A004pG0 | 910 | X033U1027p001C007p001A00 | 967 |
| | | 04pA004pC004pC007pU004p | | 4pA004pA004pA007pG004pC0 | |
| | | G007pU007pT002pU004pU00 | | 04pA004pA004pA004pA004pC | |
| | | 4pG004pC004pU004pU004pU | | 004pA007pG004pG007pU004p | |
| | | 004pU004p001G005p001A00 | | C004pU004pA004pG004p001A | |
| | | 5pX2000 | | 004p001A004 | |
| D13 | 3551 | C005p001T005p001A004pG0 | 911 | X033A1027p001C007p001A00 | 968 |
| | | 04pA004pC004pC007pU004p | | 4pA004pA004pA007pG004pC0 | |
| | | G007pU007pU007pU004pU0 | | 04pA004pA004pA004pA004pC | |
| | | 04pG004pC004pU004pU004p | | 004pA007pG004pG007pU004p | |
| | | U004pU004pG005pT005pX20 | | C004pU004pA004pG004p001A | |
| | | 00 | | 004p001A004 | |
| D14 | 3551 | C005p001T005p001A004pGO | 912 | X033A1027p001C007p001A00 | 969 |
| | | 04pA004pC004pC007pU004p | | 4pA004pA004pA007pG004pC0 | |
| | | G007pU007pT002pU004pU00 | | 04pA004pA004pA004pA004pC | |
| | | 4pG004pC004pU004pU004pU | | 004pA007pG004pG007pU004p | |
| | | 004pU004p001G005p001T005 | | C004pU004pA004pG004p001A | |
| | | pX2000 | | 004p001A004 | |
| D15 | 3551 | C005p001T005p001A004pG0 | 913 | X033A1027p001C007p001A00 | 970 |
| | | 04pA004pC004pC007pU004p | | 4pA004pA004pA007pG004pC0 | |
| | | G007pU007pU007pU004pU0 | | 04pA004pA004pA004pA004pC | |
| | | 04pG004pC004pU004pU004p | | 004pA007pG004pG007pU004p | |
| | | U004pU004p001G005p001TO | | C004pU004pA004pG004p001A | |
| | | 05pX2000 | | 004p001A004 | |
| D16 | 3551 | C005p001T005p001A004pG0 | 914 | A004p001C007p001A004pA00 | 971 |
| | | 04pA004pC004pC007pU004p | | 4pA004pA007pG004pC004pA0 | |
| | | G007pU007pT002pU004pU00 | | 04pA004pA004pA004pC004pA | |
| | | 4pG004pC004pU004pU004pU | | 007pG004pG007pU004pC004p | |
| | | 004pU004p001G005p001T005 | | U004pA004pG004p001A004p0 | |
| | | pX2000 | | 01A004 | |
| D17 | 3551 | C005p001T005p001A004pG0 | 915 | A004p001C007p001A004pA00 | 972 |
| | | 04pA004pC004pC007pU004p | | 4pA004pA007pG004pC004pA0 | |
| | | G007pU007pU007pU004pU0 | | 04pA004pA004pA004pC004pA | |
| | | 04pG004pC004pU004pU004p | | 007pG004pG007pU004pC004p | |
| | | U004pU004p001G005p001TO | | U004pA004pG004p001A004p0 | |
| | | 05pX2000 | | 01A004 | |
| D18 | 3551 | C005p001T005p001A004pG0 | 916 | X033A1027p001C007p001A04 | 973 |
| | | 04pA004pC004pC007pU004p | | 2pA004pA004pA007pG004pC0 | |
| | | G007pU007pT002pU004pU00 | | 04pA004pA004pA004pA004pC | |
| | | 4pG004pC004pU004pU004pU | | 004pA007pG004pG007pU004p | |
| | | 004pU004pG005pT005pX200 | | C004pU004pA004pG004p001A | |
| | | 0 | | 004p001A004 | |
| D19 | 3551 | C005p001T005p001A004pG0 | 917 | X033A1027p001C007p001A04 | 974 |
| | | 04pA004pC004pC007pU004p | | 2pA004pA004pA007pG004pC0 | |
| | | G007pU007pT002pU004pU00 | | 04pA004pA004pA004pA004pC | |
| | | 4pG004pC004pU004pU004pU | | 004pA007pG004pG007pU004p | |
| | | 004pU004p001G005p001T005 | | C004pU004pA004pG004p001A | |
| | | pX2000 | | 004p001A004 | |
| D20 | 3551 | C042p001U042p001A004pG0 | 918 | X033A1027p001C007p001A00 | 975 |
| | | 04pA004pC004pC007pU004p | | 4pA004pA004pA007pG004pC0 | |
| | | G007pU007pT002pU004pU00 | | 04pA004pA004pA004pA004pC | |
| | | 4pG004pC004pU004pU004pU | | 004pA007pG004pG007pU004p | |
| | | 004pU004pG042pU042pX200 | | C004pU004pA004pG004p001A | |
| | | 0 | | 004p001A004 | |
| D21 | 3551 | C042p001U042p001A004pG0 | 919 | X033A1027p001C007p001A00 | 976 |
| | | 04pA004pC004pC007pU004p | | 4pA004pA004pA007pG004pC0 | |
| | | G007pU007pT002pU004pU00 | | 04pA004pA004pA004pA004pC | |
| | | 4pG004pC004pU004pU004pU | | 004pA007pG004pG007pU004p | |
| | | 004pU004p001G042p001U04 | | C004pU004pA004pG004p001A | |
| | | 2pX2000 | | 004p001A004 | |
| D22 | 3551 | C042p001U042p001A004pG0 | 920 | X033A1027p001C007p001A04 | 977 |
| | | 04pA004pC004pC007pU004p | | 2pA004pA004pA007pG004pC0 | |
| | | G007pU007pT002pU004pU00 | | 04pA004pA004pA004pA004pC | |
| | | 4pG004pC004pU004pU004pU | | 004pA007pG004pG007pU004p | |
| | | 004pU004pG042pU042pX200 | | C004pU004pA004pG004p001A | |
| | | 0 | | 004p001A004 | |
| D23 | 3551 | C042p001U042p001A004pG0 | 921 | X033A1027p001C007p001A04 | 978 |
| | | 04pA004pC004pC007pU004p | | 2pA004pA004pA007pG004pC0 | |
| | | G007pU007pT002pU004pU00 | | 04pA004pA004pA004pA004pC | |
| | | 4pG004pC004pU004pU004pU | | 004pA007pG004pG007pU004p | |
| | | 004pU004p001G042p001U04 | | C004pU004pA004pG004p001A | |
| | | 2pX2000 | | 004p001A004 | |
| D24 | 3492 | C005p001A005p001A004pG0 | 922 | X033U1027p001A007p001A00 | 979 |
| | | 04pC004pA004pG007pA004p | | 4pA004pA004pG007pA004pU0 | |
| | | C007pA007pU007pU004pU00 | | 04pA004pA004pA004pU004pG | |
| | | 4pA004pU004pC004pU004pU | | 004pU007pC004pU007pG004p | |
| | | 004pU004pT005pA005pX200 | | C004pU004pU004pG004p001C | |
| | | 0 | | 004p001U004 | |
| D25 | 3543 | C005p001A005p001A004pC0 | 923 | X033A1027p001A007p001A00 | 980 |
| | | 04pU004pU004pU007pU004p | | 4pA004pC004pA007pG004pG0 | |
| | | C007pU007pA007pG004pA00 | | 04pU004pC004pU004pA004pG | |
| | | 4pC004pC004pU004pG004pU | | 004pA007pA004pA007pA004p | |
| | | 004pU004pT005pT005pX200 | | G004pU004pU004pG004p001G | |
| | | 0 | | 004p001C004 | |
| D26 | 3564 | G005p001C005p001U004pU0 | 924 | X033A1027p001U007p001A00 | 981 |
| | | 04pU004pU004pG007pU004p | | 4pU004pC004pU007pU004pC0 | |
| | | A007pA007pC007pU004pU00 | | 04pA004pA004pG004pU004pU | |
| | | 4pG004pA004pA004pG004p | | 004pA007pC004pA007pA004p | |
| | | A004pU004pA005pT005pX20 | | A004pA004pG004pC004p001A | |
| | | 00 | | 004p001A004 | |
| D27 | 713 | T005p001T005p001G004pA0 | 925 | X033U1027p001U007p001C00 | 982 |
| | | 04pA004pG004pU007pU004p | | 4pG004pA004pC007pA004pU0 | |
| | | G007pC007pC007pC004pC00 | | 04pG004pG004pG004pG004pC | |
| | | 4pA004pU004pG004pU004pC | | 004pA007pA004pC007pU004p | |
| | | 004pG004pA005pA005pX200 | | U004pC004pA004pA004p001G | |
| | | 0 | | 004p001G004 | |
| D28 | 1102 | C005p001C005p001U004pC0 | 926 | X033A1027p001U007p001A00 | 983 |
| | | 04pA004pU004pA007pG004p | | 4pA004pA004pC007pU004pC0 | |
| | | G007pC007pC007pU004pG00 | | 04pC004pA004pG004pG004pC | |
| | | 4pG004pA004pG004pU004p | | 004pC007pU004pA007pU004p | |
| | | U004pU004pA005pT005pX20 | | G004pA004pG004pG004p001G | |
| | | 00 | | 004p001U004 | |
| D29 | 3251 | A005p001A005p001G004pC0 | 927 | X033A1027p001A007p001G00 | 984 |
| | | 04pC004pA004pA007pG004p | | 4pU004pA004pA007pG004pA0 | |
| | | C007pC007pU007pC004pU00 | | 04pA004pG004pA004pG004pG | |
| | | 4pU004pC004pU004pU004pA | | 004pC007pU004pU007pG004p | |
| | | 004pC004pT005pT005pX200 | | G004pC004p001U004p001U00 | |
| | | 0 | | 4pC004pA004 | |
| D30 | 3252 | A005p001G005p001C004pC0 | 928 | X033U1027p001A007p001A00 | 985 |
| | | 04pA004pA004pG007pC004p | | 4pG004pU004pA007pA004pG0 | |
| | | C007pU007pC007pU004pU00 | | 04pA004pA004pG004pA004pG | |
| | | 4pC004pU004pU004pA004pC | | 004pG007pC004pU007pU004p | |
| | | 004pU004pT005pA005pX200 | | G004pG004pC004pU004p001U | |
| | | 0 | | 004p001C004 | |
| D31 | 3547 | T005p001T005p001U004pU0 | 929 | X033A1027p001A007p001G00 | 986 |
| | | 04pC004pU004pA007pG004p | | 4pC004pA004pA007pA004pA0 | |
| | | A007pC007pC007pU004pG00 | | 04pC004pA004pG004pG004pU | |
| | | 4pU004pU004pU004pU004p | | 004pC007pU004pA007pG004p | |
| | | G004pC004PT005pT005pX20 | | A004pA004p001A004p001A00 | |
| | | 00 | | 4pG004pU004 | |
| D32 | 3553 | A005p001G005p001A004pC0 | 930 | X033U1027p001U007p001A00 | 987 |
| | | 04pC004pU004pG007pU004p | | 4pC004pA004pA007pA004pA0 | |
| | | U007pU007pU007pG004pC00 | | 04pG004pC004pA004pA004pA | |
| | | 4pU004pU004pU004pU004p | | 004pA007pC004pA007pG004p | |
| | | G004pU004pA005pA005pX2 | | G004pU004pC004pU004p001A | |
| | | 000 | | 004p001G004 | |
| D33 | 3568 | T005p001T005p001G004pU0 | 931 | X033A1027p001U007p001A00 | 988 |
| | | 04pA004pA004pC007pU004p | | 4pA004pA004pU007pA004pU0 | |
| | | U007pG007pA007pA004pG0 | | 04pC004pU004pU004pC004pA | |
| | | 04pA004pU004pA004pU004p | | 004pA007pG004pU007pU004p | |
| | | U004pU004pA005pT005pX20 | | A004pC004p001A004p001A00 | |
| | | 00 | | 4pA004pA004 | |
| D34 | 3559 | G005p001T005p001U004pU0 | 932 | X033U1027p001U007p001C00 | 989 |
| | | 04pU004pG004pC007pU004p | | 4pA004pA004pG007pU004pU0 | |
| | | U007pU007pU007pG004pU0 | | 04pA004pC004pA004pA004pA | |
| | | 04pA004pA004pC004pU004p | | 004pA007pG004pC007pA004p | |
| | | U004pG004pA005pA005pX2 | | A004pA004pA004pC004p001A | |
| | | 000 | | 004p001G004 | |
| D35 | 3547 | T005p001T005p001U004pU0 | 933 | X033A1027p001A007p001G00 | 990 |
| | | 04pC004pU004pA004pG004p | | 4pC004pA004pA007pA004pA0 | |
| | | A007pC007pC007pU004pG00 | | 04pC004pA004pG004pG004pU | |
| | | 4pU004pU004pU004pU004p | | 004pC007pU004pA007pG004p | |
| | | G004pC004p001T005p001TO | | A004pA004p001A004p001A00 | |
| | | 05pX2000 | | 4pG004pU004 | |
| D36 | 3553 | A005p001G005p001A004pC0 | 934 | X033U1027p001U007p001A00 | 99 |
| | | 04pC004pU004pG007pU004p | | 4pC004pA004pA007pA004pA0 | |
| | | U007pU007pU007pG004pC00 | | 04pG004pC004pA004pA004pA | |
| | | 4pU004pU004pU004pU004p | | 004pA007pC004pA007pG004p | |
| | | G004pU004p001A005p001A0 | | G004pU004pC004pU004p001A | |
| | | 05pX2000 | | 004p001G004 | |
| D37 | 3568 | T005p001T005p001G004pU0 | 935 | X033A1027p001U007p001A00 | 992 |
| | | 04pA004pA004pC004pU004p | | 4pA004pA004pU007pA004pU0 | |
| | | U007pG007pA007pA004pG0 | | 04pC004pU004pU004pC004pA | |
| | | 04pA004pU004pA004pU004p | | 004pA007pG004pU007pU004p | |
| | | U004pU004p001A005p001TO | | A004pC004p001A004p001A00 | |
| | | 05pX2000 | | 4pA004pA004 | |
| D38 | 3559 | G005p001T005p001U004pU0 | 936 | X033U1027p001U007p001C00 | 993 |
| | | 04pU004pG004pC007pU004p | | 4pA004pA004pG007pU004pU0 | |
| | | U007pU007pU007pG004pU0 | | 04pA004pC004pA004pA004pA | |
| | | 04pA004pA004pC004pU004p | | 004pA007pG004pC007pA004p | |
| | | U004pG004p001A005p001A0 | | A004pA004pA004pC004p001A | |
| | | 05pX2000 | | 004p001G004 | |
| D39 | 3559 | G005p001T005p001U004pU0 | 937 | X033U1027p001U007p001C00 | 994 |
| | | 04pU004pG004pC007pU004p | | 4pA004pA1016pG007pU004pU | |
| | | U007pU007pU007pG004pU0 | | 004pA004pC004pA004pA004p | |
| | | 04pA004pA004pC004pU004p | | A004pA007pG004pC007pA004 | |
| | | U004pG004p001A005p001A0 | | pA004pA004pA004pC004p001 | |
| | | 05pX2000 | | A004p001G004 | |
| D40 | 3559 | G005p001T005p001U004pU0 | 938 | X033U1027p001U007p001C00 | 995 |
| | | 04pU004pG004pC007pU004p | | 4pA004pA004pG1016pU004pU | |
| | | U007pU007pU007pG004pU0 | | 004pA004pC004pA004pA004p | |
| | | 04pA004pA004pC004pU004p | | A004pA007pG004pC007pA004 | |
| | | U004pG004p001A005p001A0 | | pA004pA004pA004pC004p001 | |
| | | 05pX2000 | | A004p001G004 | |
| D41 | 3559 | G005p001T005p001U004pU0 | 939 | X033U1027p001U007p001C00 | 996 |
| | | 04pU004pG004pC007pU004p | | 4pA004pA004pG007pU1016pU | |
| | | U007pU007pU007pG004pU0 | | 004pA004pC004pA004pA004p | |
| | | 04pA004pA004pC004pU004p | | A004pA007pG004pC007pA004 | |
| | | U004pG004p001A005p001A0 | | pA004pA004pA004pC004p001 | |
| | | 05pX2000 | | A004p001G004 | |
| D42 | 3559 | G005p001T005p001U004pU0 | 940 | X033U1027p001U007p001C00 | 997 |
| | | 04pU004pG004pC007pU004p | | 4pA004pA042pG007pU004pU0 | |
| | | U007pU007pU007pG004pU0 | | 04pA004pC004pA004pA004pA | |
| | | 04pA004pA004pC004pU004p | | 004pA007pG004pC007pA004p | |
| | | U004pG004p001A005p001A0 | | A004pA004pA004pC004p001A | |
| | | 05pX2000 | | 004p001G004 | |
| D43 | 3559 | G005p001T005p001U004pU0 | 941 | X033U1027p001U007p001C00 | 998 |
| | | 04pU004pG004pC007pU004p | | 4pA004pA004pG042pU004pU0 | |
| | | U007pU007pU007pG004pU0 | | 04pA004pC004pA004pA004pA | |
| | | 04pA004pA004pC004pU004p | | 004pA007pG004pC007pA004p | |
| | | U004pG004p001A005p001A0 | | A004pA004pA004pC004p001A | |
| | | 05pX2000 | | 004p001G004 | |
| D44 | 3559 | G005p001T005p001U004pU0 | 942 | X033U1027p001U007p001C00 | 999 |
| | | 04pU004pG004pC007pU004p | | 4pA004pA004pG007pU042pU0 | |
| | | U007pU007pU007pG004pU0 | | 04pA004pC004pA004pA004pA | |
| | | 04pA004pA004pC004pU004p | | 004pA007pG004pC007pA004p | |
| | | U004pG004p001A005p001A0 | | A004pA004pA004pC004p001A | |
| | | 05pX2000 | | 004p001G004 | |
| D45 | 3559 | G005p001T005p001U004pU0 | 943 | X033U1027p001U007p001C00 | 1000 |
| | | 04pU004pG004pC007pU004p | | 4pA004pA002pG007pU004pU0 | |
| | | U007pU007pU007pG004pU0 | | 04pA004pC004pA004pA004pA | |
| | | 04pA004pA004pC004pU004p | | 004pA007pG004pC007pA004p | |
| | | U004pG004p001A005p001A0 | | A004pA004pA004pC004p001A | |
| | | 05pX2000 | | 004p001G004 | |
| D46 | 3559 | G005p001T005p001U004pU0 | 944 | X033U1027p001U007p001C00 | 1001 |
| | | 04pU004pG004pC007pU004p | | 4pA004pA004pG002pU004pU0 | |
| | | U007pU007pU007pG004pU0 | | 04pA004pC004pA004pA004pA | |
| | | 04pA004pA004pC004pU004p | | 004pA007pG004pC007pA004p | |
| | | U004pG004p001A005p001A0 | | A004pA004pA004pC004p001A | |
| | | 05pX2000 | | 004p001G004 | |
| D47 | 3559 | G005p001T005p001U004pU0 | 945 | X033U1027p001U007p001C00 | 1002 |
| | | 04pU004pG004pC007pU004p | | 4pA004pA004pG007pT002pU0 | |
| | | U007pU007pU007pG004pU0 | | 04pA004pC004pA004pA004pA | |
| | | 04pA004pA004pC004pU004p | | 004pA007pG004pC007pA004p | |
| | | U004pG004p001A005p001A0 | | A004pA004pA004pC004p001A | |
| | | 05pX2000 | | 004p001G004 | |
| D48 | 3559 | G005p001T005p001U004pU0 | 946 | X033U1027p001U007p001U00 | 1003 |
| | | 04pU004pG004pC007pU004p | | 4pA004pA004pG007pU004pU0 | |
| | | U007pU007pU007pG004pU0 | | 04pA004pC004pA004pA004pA | |
| | | 04pA004pA004pC004pU004p | | 004pA007pG004pC007pA004p | |
| | | U004pA004p001A005p001A0 | | A004pA004pA004pC004p001A | |
| | | 05pX2000 | | 004p001G004 | |
| D49 | 3551 | A1039p001C005p001T005pA | 1025 | X033A1032p001C007p001A00 | 1031 |
| | | 004pG004pA004pC004pC007 | | 4pA004pA004pA007pG004pC0 | |
| | | pU004pG007pU007pT002pU0 | | 04pA004pA004pA004pA004pC | |
| | | 04pU004pG004pC004pU004p | | 004pA007pG004pG007pU004p | |
| | | U004pU004pU004p001G005p | | C004pU004pA004pG004p001A | |
| | | 001T005pX2000 | | 004p001A004 | |
| D50 | 3551 | A1039p001C005p001T005pA | 1026 | X033A1027p001C007p001A00 | 1032 |
| | | 004pG004pA004pC004pC007 | | 4pA004pA004pA007pG004pC0 | |
| | | pU004pG007pU007pT002pU0 | | 04pA004pA004pA004pA004pC | |
| | | 04pU004pG004pC004pU004p | | 004pA007pG004pG007pU004p | |
| | | U004pU004pU004pG005p001 | | C004pU004pA004pG004p001A | |
| | | T005p001A1039pX2000 | | 004p001A004 | |
| D51 | 3551 | C005p001T005p001A004pG0 | 947 | X033A1027p001C007p001A00 | 1004 |
| (D14- | | 04pA004pC004pC007pU004p | | 4pA004pA004pA007pG004pC0 | |
| 1) | | G007pU007pT002pU004pU00 | | 04pA004pA004pA004pA004pC | |
| | | 4pG004pC004pU004pU004pU | | 004pA007pG004pG007pU004p | |
| | | 004pU004p001G005p001T005 | | C004pU004pA004pG004p001A | |
| | | pX1085 | | 004p001A004 | |
| D52 | 3551 | C005p001T005p001A004pG0 | 948 | X033A1027p001C007p001A04 | 1005 |
| (D19- | | 04pA004pC004pC007pU004p | | 2pA004pA004pA007pG004pC0 | |
| 1) | | G007pU007pT002pU004pU00 | | 04pA004pA004pA004pA004pC | |
| | | 4pG004pC004pU004pU004pU | | 004pA007pG004pG007pU004p | |
| | | 004pU004p001G005p001T005 | | C004pU004pA004pG004p001A | |
| | | pX1085 | | 004p001A004 | |
| D53 | 3551 | C042p001U042p001A004pG0 | 949 | X033A1027p001C007p001A00 | 1006 |
| (D21- | | 04pA004pC004pC007pU004p | | 4pA004pA004pA007pG004pC0 | |
| 1) | | G007pU007pT002pU004pU00 | | 04pA004pA004pA004pA004pC | |
| | | 4pG004pC004pU004pU004pU | | 004pA007pG004pG007pU004p | |
| | | 004pU004p001G042p001U04 | | C004pU004pA004pG004p001A | |
| | | 2pX1085 | | 004p001A004 | |
| D54 | 3559 | G005p001T005p001U004pU0 | 950 | X033U1027p001U007p001C00 | 1007 |
| (D38- | | 04pU004pG004pC007pU004p | | 4pA004pA004pG007pU004pU0 | |
| 1) | | U007pU007pU007pG004pU0 | | 04pA004pC004pA004pA004pA | |
| | | 04pA004pA004pC004pU004p | | 004pA007pG004pC007pA004p | |
| | | U004pG004p001A005p001A0 | | A004pA004pA004pC004p001A | |
| | | 05pX1085 | | 004p001G004 | |
| D55 | 3559 | G005p001T005p001U004pU0 | 951 | X033U1027p001U007p001C04 | 1008 |
| | | 04pU004pG004pC007pU004p | | 2pA004pA004pG007pU004pU0 | |
| | | U007pU007pU007pG004pU0 | | 04pA004pC004pA004pA004pA | |
| | | 04pA004pA004pC004pU004p | | 004pA007pG004pC007pA004p | |
| | | U004pG004p001A005p001A0 | | A004pA004pA004pC004p001A | |
| | | 05pX2000 | | 004p001G004 | |
| D56 | 3559 | G005p001T005p001U004pU0 | 952 | X033U1027p001U007p001C04 | 1009 |
| | | 04pU004pG004pC007pU004p | | 2pA004pA042pG007pU004pU0 | |
| | | U007pU007pU007pG004pU0 | | 04pA004pC004pA004pA004pA | |
| | | 04pA004pA004pC004pU004p | | 004pA007pG004pC007pA004p | |
| | | U004pG004p001A005p001A0 | | A004pA004pA004pC004p001A | |
| | | 05pX2000 | | 004p001G004 | |
| D57 | 3559 | G005p001T005p001U004pU0 | 953 | X033U1027p001U007p001C04 | 1010 |
| | | 04pU004pG004pC007pU004p | | 2pA004pA004pG042pU004pU0 | |
| | | U007pU007pU007pG004pU0 | | 04pA004pC004pA004pA004pA | |
| | | 04pA004pA004pC004pU004p | | 004pA007pG004pC007pA004p | |
| | | U004pG004p001A005p001A0 | | A004pA004pA004pC004p001A | |
| | | 05pX2000 | | 004p001G004 | |
| D58 | 3559 | G005p001T005p001U004pU0 | 954 | X033U1027p001U007p001C04 | 1011 |
| | | 04pU004pG004pC007pU004p | | 2pA004pA004pG007pU042pU0 | |
| | | U007pU007pU007pG004pU0 | | 04pA004pC004pA004pA004pA | |
| | | 04pA004pA004pC004pU004p | | 004pA007pG004pC007pA004p | |
| | | U004pG004p001A005p001A0 | | A004pA004pA004pC004p001A | |
| | | 05pX2000 | | 004p001G004 | |
| D59 | 3559 | G005p001T005p001U004pU0 | 955 | X033U1027p001U007p001C00 | 1012 |
| | | 04pU004pG004pC007pU004p | | 4pA004pA002pG007pT002pU0 | |
| | | U007pU007pU007pG004pU0 | | 04pA004pC004pA004pA004pA | |
| | | 04pA004pA004pC004pU004p | | 004pA007pG004pC007pA004p | |
| | | U004pG004p001A005p001A0 | | A004pA004pA004pC004p001A | |
| | | 05pX2000 | | 004p001G004 | |
| D60 | 3551 | C005p001T005p001A004pG0 | 1027 | X033A1027p001C007p001A04 | 1033 |
| | | 04pA004pC004pC007pU004p | | 2pA004pA042pA007pG004pC0 | |
| | | G007pU007pT002pU004pU00 | | 04pA004pA004pA004pA004pC | |
| | | 4pG004pC004pU004pU004pU | | 004pA007pG004pG007pU004p | |
| | | 004pU004p001G005p001T005 | | C004pU004pA004pG004p001A | |
| | | pX1085 | | 004p001A004 | |
| D61 | 3551 | C005p001T005p001A004pG0 | 1028 | X033A1027p001C007p001A04 | 1034 |
| | | 04pA004pC004pC007pU004p | | 2pA004pA004pA042pG004pC0 | |
| | | G007pU007pT002pU004pU00 | | 04pA004pA004pA004pA004pC | |
| | | 4pG004pC004pU004pU004pU | | 004pA007pG004pG007pU004p | |
| | | 004pU004p001G005p001T005 | | C004pU004pA004pG004p001A | |
| | | pX1085 | | 004p001A004 | |
| D62 | 3551 | C005p001T005p001A004pG0 | 1029 | X033A1027p001C007p001A04 | 1035 |
| | | 04pA004pC004pC007pU004p | | 2pA004pA004pA007pG042pC0 | |
| | | G007pU007pT002pU004pU00 | | 04pA004pA004pA004pA004pC | |
| | | 4pG004pC004pU004pU004pU | | 004pA007pG004pG007pU004p | |
| | | 004pU004p001G005p001T005 | | C004pU004pA004pG004p001A | |
| | | pX1085 | | 004p001A004 | |
| D63 | 3551 | X2171p001C005p001T005pA | 1030 | X033A1032p001C007p001A00 | 1036 |
| (D49- | | 004pG004pA004pC004pC007 | | 4pA004pA004pA007pG004pC0 | |
| 1) | | pU004pG007pU007pT002pU0 | | 04pA004pA004pA004pA004pC | |
| | | 04pU004pG004pC004pU004p | | 004pA007pG004pG007pU004p | |
| | | U004pU004pU004p001G005p | | C004pU004pA004pG004p001A | |
| | | 001T005pX1085 | | 004p001A004 | |

[chemical structure]

[0969] The codes in Table 6 are the same as the codes described in Table A.

[0970] Combinations of dsRNA and ligands as described herein are not limited to the examples and embodiments discussed above.

[0971] In some embodiments, a dsRNAi agent includes:
[0972] (i) a sense strand including SEQ ID NO: 906, and
[0973] (ii) an antisense strand including SEQ ID NO: 963;
[0974] wherein the ligand (L96) is conjugated to 3′ end of the sense strand to form the following schematic:

[chemical structure]

[0975] or a pharmaceutically acceptable salt,
[0976] wherein W is —OH or —SH.

[0977] In some embodiments, a double stranded RNAi agent includes:
[0978] (i) a sense strand including SEQ ID NO: 906,
[0979] (ii) an antisense strand including SEQ ID NO: 963;
[0980] wherein the ligand (L96) is conjugated to 3′ end of the sense strand to form the following schematic:

[chemical structure]

[0981] or a pharmaceutically acceptable salt,
[0982] wherein W is —OH.

[0983] In some embodiments, a dsRNAi agent includes:
[0984] (i) a sense strand consisting of SEQ ID NO: 906, and
[0985] (ii) an antisense strand consisting of SEQ ID NO: 963;
[0986] wherein the ligand (L96) is conjugated to 3′ end of the sense strand to form the following schematic:

[chemical structure]

[0987] or a pharmaceutically acceptable salt,
[0988] wherein W is —OH or —SH.

[0989] In some embodiments, a double stranded RNAi agent includes:
[0990] (i) a sense strand consisting of SEQ ID NO: 906,
[0991] (ii) an antisense strand consisting of SEQ ID NO: 963;
[0992] wherein the ligand (L96) is conjugated to 3′ end of the sense strand to form the following schematic:

[chemical structure]

[0993] or a pharmaceutically acceptable salt,
[0994] wherein W is —OH.

[0995] In some embodiments, a dsRNAi agent includes:
[0996] (i) a sense strand including SEQ ID NO: 907, and
[0997] (ii) an antisense strand including SEQ ID NO: 964;
[0998] wherein the ligand (L96) is conjugated to 3′ end of the sense strand to form the following schematic:

[chemical structure]

[0999] or a pharmaceutically acceptable salt,
[1000] wherein W is —OH or —SH.

[1001] In some embodiments, a double stranded RNAi agent includes:
[1002] (i) a sense strand including SEQ ID NO: 907, and
[1003] (ii) an antisense strand including SEQ ID NO: 964;
[1004] wherein the ligand (L96) is conjugated to 3′ end of the sense strand to form the following schematic:

[chemical structure]

[1005] or a pharmaceutically acceptable salt,
[1006] wherein W is —OH.

[1007] In some embodiments, a dsRNAi agent includes:
[1008] (i) a sense strand consisting of SEQ ID NO: 907, and
[1009] (ii) an antisense strand consisting of SEQ ID NO: 964;
[1010] wherein the ligand (L96) is conjugated to 3′ end of the sense strand to form the following schematic:

[chemical structure]

[1011] or a pharmaceutically acceptable salt,
[1012] wherein W is —OH or —SH.

[1013] In some embodiments, a double stranded RNAi agent includes:
[1014] (i) a sense strand consisting of SEQ ID NO: 907, and
[1015] (ii) an antisense strand consisting of SEQ ID NO: 964;
[1016] wherein the ligand (L96) is conjugated to 3′ end of the sense strand to form the following schematic:

[chemical structure]

[1017] or a pharmaceutically acceptable salt,
[1018] wherein W is —OH.

[1019] In some embodiments, a dsRNAi agent includes:
[1020] (i) a sense strand including SEQ ID NO: 947, and
[1021] (ii) an antisense strand including SEQ ID NO: 1004;
[1022] wherein the ligand (L96) is conjugated to 3′ end of the sense strand to form the following schematic:

[chemical structure]

[1023] or a pharmaceutically acceptable salt,
[1024] wherein W is —OH or —SH.

[1025] In some embodiments, a double stranded RNAi agent includes:
[1026] (i) a sense strand including SEQ ID NO: 947, and
[1027] (ii) an antisense strand including SEQ ID NO: 1004;
[1028] wherein the ligand (L96) is conjugated to 3′ end of the sense strand to form the following schematic:

[chemical structure]

[1029] or a pharmaceutically acceptable salt,
[1030] wherein W is —OH.

[1031] In some embodiments, a dsRNAi agent includes:
[1032] (i) a sense strand consisting of SEQ ID NO: 947, and
[1033] (ii) an antisense strand consisting of SEQ ID NO: 1004;
[1034] wherein the ligand (L96) is conjugated to 3′ end of the sense strand to form the

[chemical structure]

[1035] or a pharmaceutically acceptable salt,
[1036] wherein W is —OH or —SH.

[1037] In some embodiments, a double stranded RNAi agent includes:
[1038] (i) a sense strand consisting of SEQ ID NO: 947, and
[1039] (ii) an antisense strand consisting of SEQ ID NO: 1004;
[1040] wherein the ligand (L96) is conjugated to 3′ end of the sense strand to form the following schematic:

[chemical structure]

[1041] or a pharmaceutically acceptable salt,
[1042] wherein W is —OH.

[1043] In some embodiments, a dsRNAi agent includes:
[1044] (i) a sense strand including SEQ ID NO: 948, and
[1045] (ii) an antisense strand including SEQ ID NO: 1005;
[1046] wherein the ligand (L96) is conjugated to 3′ end of the sense strand to form the following schematic:

[chemical structure]

[1047] or a pharmaceutically acceptable salt,
[1048] wherein W is —OH or —SH.

[1049] In some embodiments, a double stranded RNAi agent includes:
[1050] (i) a sense strand including SEQ ID NO: 948, and
[1051] (ii) an antisense strand including SEQ ID NO: 1005;
[1052] wherein the ligand (L96) is conjugated to 3′ end of the sense strand to form the following schematic:

[chemical structure]

[1053] or a pharmaceutically acceptable salt,
[1054] wherein W is —OH.

[1055] In some embodiments, a dsRNAi agent includes:
[1056] (i) a sense strand consisting of SEQ ID NO: 948, and
[1057] (ii) an antisense strand consisting of SEQ ID NO: 1005;
[1058] wherein the ligand (L96) is conjugated to 3′ end of the sense strand to form the following schematic:

[chemical structure]

[1059] or a pharmaceutically acceptable salt,
[1060] wherein W is —OH or —SH.

[1061] In some embodiments, a double stranded RNAi agent includes:
[1062] (i) a sense strand consisting of SEQ ID NO: 948, and
[1063] (ii) an antisense strand consisting of SEQ ID NO: 1005;
[1064] wherein the ligand (L96) is conjugated to 3′ end of the sense strand to form the following schematic:

[chemical structure]

[1065] or a pharmaceutically acceptable salt,
[1066] wherein W is —OH.

[1067] In some embodiments, a dsRNAi agent includes:
[1068] (i) a sense strand including SEQ ID NO: 949, and
[1069] (ii) an antisense strand including SEQ ID NO: 1006;
[1070] wherein the ligand (L96) is conjugated to 3′ end of the sense strand to form the following schematic:

[chemical structure]

[1071] or a pharmaceutically acceptable salt,
[1072] wherein W is —OH or —SH.

[1073] In some embodiments, a double stranded RNAi agent includes:
[1074] (i) a sense strand including SEQ ID NO: 949, and
[1075] (ii) an antisense strand including SEQ ID NO: 1006;
[1076] wherein the ligand (L96) is conjugated to 3′ end of the sense strand to form the following schematic:

[chemical structure]

[1077] or a pharmaceutically acceptable salt,
[1078] wherein W is —OH.

[1079] In some embodiments, a dsRNAi agent includes:
[1080] (i) a sense strand consisting of SEQ ID NO: 949, and
[1081] (ii) an antisense strand consisting of SEQ ID NO: 1006;
[1082] wherein the ligand (L96) is conjugated to 3′ end of the sense strand to form the following schematic:

[chemical structure]

[1083] or a pharmaceutically acceptable salt,
[1084] wherein W is —OH or —SH.

[1085] In some embodiments, a double stranded RNAi agent includes:
[1086] (i) a sense strand consisting of SEQ ID NO: 949, and
[1087] (ii) an antisense strand consisting of SEQ ID NO: 1006;
[1088] wherein the ligand (L96) is conjugated to 3′ end of the sense strand to form the following schematic:

[chemical structure]

[1089] or a pharmaceutically acceptable salt,
[1090] wherein W is —OH.

[1091] In some embodiments, a dsRNAi agent includes:
[1092] (i) a sense strand including SEQ ID NO: 950, and
[1093] (ii) an antisense strand including SEQ ID NO: 1007;
[1094] wherein the ligand (L96) is conjugated to 3′ end of the sense strand to form the following schematic:

[chemical structure]

[1095] or a pharmaceutically acceptable salt,
[1096] wherein W is —OH or —SH.

[1097] In some embodiments, a double stranded RNAi agent includes:
[1098] (i) a sense strand including SEQ ID NO: 950, and
[1099] (ii) an antisense strand including SEQ ID NO: 1007;
[1100] wherein the ligand (L96) is conjugated to 3′ end of the sense strand to form the following schematic:

[chemical structure]

[1101] or a pharmaceutically acceptable salt,
[1102] wherein W is —OH.

[1103] In some embodiments, a dsRNAi agent includes:
[1104] (i) a sense strand consisting of SEQ ID NO: 950, and
[1105] (ii) an antisense strand consisting of SEQ ID NO: 1007;
[1106] wherein the ligand (L96) is conjugated to 3′ end of the sense strand to form the following schematic:

[chemical structure]

[1107] or a pharmaceutically acceptable salt,
[1108] wherein W is —OH or —SH.

[1109] In some embodiments, a double stranded RNAi agent includes:
[1110] (i) a sense strand consisting of SEQ ID NO: 950, and
[1111] (ii) an antisense strand consisting of SEQ ID NO: 1007;
[1112] wherein the ligand (L96) is conjugated to 3′ end of the sense strand to form the following schematic:

[chemical structure]

[1113] or a pharmaceutically acceptable salt,
[1114] wherein W is —OH.

[1115] In some embodiments, a double stranded RNAi agent (e.g., siRNA agent) includes:
[1116] (i) a sense strand (SS) comprising a nucleotide sequence of

(SEQ ID NO: 800)
5′-C005p001T005p001A004pG004pA004pC004pC007pU
004pG007pU007pT002pU004pU004pG004pC004pU004pU
004pU004pU004pG005pT005-3′;

[1117] (ii) an antisense strand (AS) comprising a nucleotide sequence of

(SEQ ID NO: 853)
5′-X033A1027p001C007p001A004pA004pA004pA007pG
004pC004pA004pA004pA004pA004pC004pA007pG004pG
007pU004pC004pU004pA004pG004p001A004p001A004-3′;

and
[1118] (iii) a ligand (L96),
   wherein:
[1119] T002 is 2′-deoxy thymidine (dT); A004 is 2′-O-methyladenosine; U004 is 2′-O-methyluridine; C004 is 2′-O-methylcytidine; G004 is 2′-O-methylguanosine; A005 is 2′-O-methoxyethyl(MOE) adenosine; T005 is 2′-O-methoxyethyl(MOE)thymidine (or 5-methyl uridine); C005 is 2′-O-methoxyethyl(MOE)5-methyl-cytidine; G005 is 2′-O-methoxyethyl (MOE)guanosine; A007 is 2′-fluoroadenosine; U007 is 2′-fluorouridine; C007 is 2′-fluorocytidine; G007 is 2′-fluoroguanosine; X033A1027 is 5′-(E)-vinylphosphonate-2′-O-methyladenosine; p is a phosphodiester linkage; and p001 is a phosphorothioate linkage,
   wherein the ligand (L96) is

[chemical structure]

wherein the ligand is conjugated to 3′ end of the sense strand (SS) via a phosphodiester linkage to form the following schematic:

[chemical structure]

or a pharmaceutically acceptable salt thereof (e.g., sodium salt form).

[1120] In some embodiments, a double stranded RNAi agent (e.g., siRNA agent) includes:
[1121] (i) a sense strand (SS) consisting of a nucleotide sequence of: 5′-C005p001T005p001A004pG004pA004pC004pC007pU004pG007pU007pT002pU004pU004pG 004pC004pU004pU004pU004pU004pG005pT005-3′ (SEQ ID NO: 800);
[1122] (ii) an antisense strand (AS) consisting of a nucleotide sequence of: 5′-X033A1027p001C007p001A004pA004pA004pA007pG004pC004pA004pA004pA004pA004pC 004pA007pG004pG007pU004pC004pU004pA004pG004p001A004p001A004-3′ (SEQ ID NO: 853); and
[1123] (iii) a ligand (L96),
   wherein:
[1124] T002 is 2′-deoxy thymidine (dT); A004 is 2′-O-methyladenosine; U004 is 2′-O-methyluridine; C004 is 2′-O-methylcytidine; G004 is 2′-O-methylguanosine; A005 is 2′-O-methoxyethyl(MOE) adenosine; T005 is 2′-O-methoxyethyl(MOE)thymidine (or 5-methyl uridine); C005 is 2′-O-methoxyethyl(MOE)5-methyl-cytidine; G005 is 2′-O-methoxyethyl (MOE)guanosine; A007 is 2′-fluoroadenosine; U007 is 2′-fluorouridine; C007 is 2′-fluorocytidine; G007 is 2′-fluoroguanosine; X033A1027 is 5′-(E)-vinylphosphonate-2′-O-methyladenosine; p is a phosphodiester linkage; and p001 is a phosphorothioate linkage,
   wherein the ligand (L96) is

[chemical structure]

wherein the ligand is conjugated to 3′ end of the sense strand (SS) via a phosphodiester linkage to form the following schematic:

[chemical structure]

or a pharmaceutically acceptable salt thereof (e.g., sodium salt form).

[1125] In some embodiments, a double stranded RNAi agent includes:
[1126] (i) a sense strand (SS) comprising

(SEQ ID NO: 906)
5′-C005p001T005p001A004pG004pA004pC004pC007pU
004pG007pU007pT002pU004pU004pG004pC004pU004pU
004pU004pU004pG005pT005pX1085-3′;

and
[1127] (ii) an antisense strand (AS) comprising

(SEQ ID NO: 963)
5′-X033A1027p001C007p001A004pA004pA004pA007pG
004pC004pA004pA004pA004pA004pC004pA007pG004pG
007pU004pC004pU004pA004pG004p001A004p001A004-3′;

wherein:
[1128] T002 is 2′-deoxy thymidine (dT); A004 is 2′-O-methyladenosine; U004 is 2′-O-methyluridine; C004 is 2′-O-methylcytidine; G004 is 2′-O-methylguanosine; A005 is 2′-O-methoxyethyl(MOE) adenosine; T005 is 2′-O-methoxyethyl(MOE)thymidine (or 5-methyl uridine); C005 is 2′-O-methoxyethyl(MOE)5-methyl-cytidine; G005 is 2′-O-methoxyethyl (MOE)guanosine; A007 is 2′-fluoroadenosine; U007 is 2′-fluorouridine; C007 is 2′-fluorocytidine; G007 is 2′-fluoroguanosine; X033A1027 is 5′-(E)-vinylphosphonate-2′-O-methyladenosine; p is a phosphodiester linkage; and p001 is a phosphorothioate linkage, and
[1129] X1085 is a ligand (L96),
   [1130] wherein the ligand (L96) is

[chemical structure]

wherein the dsRNAi agent has the following schematic:

[chemical structure]

or a pharmaceutically acceptable salt thereof (e.g., sodium salt form).

[1131] In some embodiments, a double stranded RNAi agent includes:
[1132] (i) a sense strand (SS) consisting of

(SEQ ID NO: 906)
5′-C005p001T005p001A004pG004pA004pC004pC007pU
004pG007pU007pT002pU004pU004pG004pC004pU004pU
004pU004pU004pG005pT005pX1085-3′;

and
[1133] (ii) an antisense strand (AS) consisting of

(SEQ ID NO: 963)
5′-X033A1027p001C007p001A004pA004pA004pA007pG
004pC004pA004pA004pA004pA004pC004pA007pG004pG
007pU004pC004pU004pA004pG004p001A004p001A00
4-3′;

wherein:
[1134] T002 is 2′-deoxy thymidine (dT); A004 is 2′-O-methyladenosine; U004 is 2′-O-methyluridine; C004 is 2′-O-methylcytidine; G004 is 2′-O-methylguanosine; A005 is 2′-O-methoxyethyl(MOE) adenosine; T005 is 2′-O-methoxyethyl(MOE)thymidine (or 5-methyl uridine); C005 is 2′-O-methoxyethyl(MOE)5-methyl-cytidine; G005 is 2′-O-methoxyethyl (MOE)guanosine; A007 is 2′-fluoroadenosine; U007 is 2′-fluorouridine; C007 is 2′-fluorocytidine; G007 is 2′-fluoroguanosine; X033A1027 is 5′-(E)-vinylphosphonate-2′-O-methyladenosine; p is a phosphodiester linkage; and p001 is a phosphorothioate linkage, and
[1135] X1085 is a ligand (L96),
   [1136] wherein the ligand (L96) is

[chemical structure]

wherein the dsRNAi agent has the following schematic:

[chemical structure]

or a pharmaceutically acceptable salt thereof (e.g., sodium salt form).

[1137] In some embodiments, a double stranded RNAi agent (e.g., siRNA agent) includes:
[1138] (iii) a sense strand (SS) comprising a nucleotide sequence of

(SEQ ID NO: 801)
5′-C005p001T005p001A004pG004pA004pC004pC007pU
004pG007pU007pT002pU004pU004pG004pC004pU004pU
004pU004pU004pG005pT005-3′;

[1139] (iv) an antisense strand (AS) comprising a nucleotide sequence of

(SEQ ID NO: 854)
5′-A004p001C007p001A004pA004pA004pA007pG004pC
004pA004pA004pA004pA004pC004pA007pG004pG007pU
004pC004pU004pA004pG004p001A004p001A004-3′;

and
[1140] (iii) a ligand (L96),
   wherein:
[1141] T002 is 2′-deoxy thymidine (dT); A004 is 2′-O-methyladenosine; U004 is 2′-O-methyluridine; C004 is 2′-O-methylcytidine; G004 is 2′-O-methylguanosine; A005 is 2′-O-methoxyethyl(MOE) adenosine; T005 is 2′-O-methoxyethyl(MOE)thymidine (or 5-methyl uridine); C005 is 2′-O-methoxyethyl(MOE)5-methyl-cytidine; G005 is 2′-O-methoxyethyl (MOE)guanosine; A007 is 2′-fluoroadenosine; U007 is 2′-fluorouridine; C007 is 2′-fluorocytidine; G007 is 2′-fluoroguanosine; p is a phosphodiester linkage; and p001 is a phosphorothioate linkage,
   wherein the ligand (L96) is

[chemical structure]

wherein the ligand is conjugated to 3′ end of the sense strand (SS) via a phosphodiester linkage to form the following schematic:

[chemical structure]

or a pharmaceutically acceptable salt thereof (e.g., sodium salt form).

[1142] In some embodiments, a double stranded RNAi agent (e.g., siRNA agent) includes:
[1143] (i) a sense strand (SS) consisting of a nucleotide sequence of:

(SEQ ID NO: 801)
5′-C005p001T005p001A004pG004pA004pC004pC007pU
004pG007pU007pT002pU004pU004pG004pC004pU004pU
004pU004pU004pG005pT005-3′;

[1144] (ii) an antisense strand (AS) consisting of a nucleotide sequence of:

(SEQ ID NO: 854)
5′-A004p001C007p001A004pA004pA004pA007pG004pC004pA004pA004pA004pA004pC004pA
007pG004pG007pU004pC004pU004pA004pG004p001A004p001A004-3′;

and
[1145] (iii) a ligand (L96),
   wherein:
[1146] T002 is 2′-deoxy thymidine (dT); A004 is 2′-O-methyladenosine; U004 is 2′-O-methyluridine; C004 is 2′-O-methylcytidine; G004 is 2′-O-methylguanosine; A005 is 2′-O-methoxyethyl(MOE) adenosine; T005 is 2′-O-methoxyethyl(MOE)thymidine (or 5-methyl uridine); C005 is 2′-O-methoxyethyl(MOE)5-methyl-cytidine; G005 is 2′-O-methoxyethyl (MOE)guanosine; A007 is 2′-fluoroadenosine; U007 is 2′-fluorouridine; C007 is 2′-fluorocytidine; G007 is 2′-fluoroguanosine; p is a phosphodiester linkage; and p001 is a phosphorothioate linkage,
   wherein the ligand (L96) is

[chemical structure]

wherein the ligand is conjugated to 3′ end of the sense strand (SS) via a phosphodiester linkage to form the following schematic:

[chemical structure]

or a pharmaceutically acceptable salt thereof (e.g., sodium salt form).

[1147] In some embodiments, a double stranded RNAi agent includes:
[1148] (i) a sense strand (SS) comprising

(SEQ ID NO: 907)
5′-C005p001T005p001A004pG004pA004pC004pC007pU004pG007pU007pT002pU004pU004pG
004pC004pU004pU004pU004pU004pG005pT005pX1085-3′;

and
[1149] (ii) an antisense strand (AS) comprising

(SEQ ID NO: 964)
5′-A004p001C007p001A004pA004pA004pA007pG004pC004pA004pA004pA004pA004pC004pA
007pG004pG007pU004pC004pU004pA004pG004p001A004p001A004-3′;

wherein:
[1150] T002 is 2′-deoxy thymidine (dT); A004 is 2′-O-methyladenosine; U004 is 2′-O-methyluridine; C004 is 2′-O-methylcytidine; G004 is 2′-O-methylguanosine; A005 is 2′-O-methoxyethyl(MOE) adenosine; T005 is 2′-O-methoxyethyl(MOE)thymidine (or 5-methyl uridine); C005 is 2′-O-methoxyethyl(MOE)5-methyl-cytidine; G005 is 2′-O-methoxyethyl (MOE)guanosine; A007 is 2′-fluoroadenosine; U007 is 2′-fluorouridine; C007 is 2′-fluorocytidine; G007 is 2′-fluoroguanosine; p is a phosphodiester linkage; and p001 is a phosphorothioate linkage, and
[1151] X1085 is a ligand (L96),
   [1152] wherein the ligand (L96) is

[chemical structure]

wherein the dsRNAi agent has the following schematic:

[chemical structure]

or a pharmaceutically acceptable salt thereof (e.g., sodium salt form).

[1153] In some embodiments, a double stranded RNAi agent includes:
[1154] (i) a sense strand (SS) consisting of

(SEQ ID NO: 907)
5′-C005p001T005p001A004pG004pA004pC004pC007pU004pG007pU007pT002pU004pU004pG
004pC004pU004pU004pU004pU004pG005pT005pX1085-3′;

and
[1155] (ii) an antisense strand (AS) consisting of

(SEQ ID NO: 964)
5′-A004p001C007p001A004pA004pA004pA007pG004pC004pA004pA004pA004pA004pC004pA
007pG004pG007pU004pC004pU004pA004pG004p001A004p001A004-3′;

wherein:
[1156] T002 is 2′-deoxy thymidine (dT); A004 is 2′-O-methyladenosine; U004 is 2′-O-methyluridine; C004 is 2′-O-methylcytidine; G004 is 2′-O-methylguanosine; A005 is 2′-O-methoxyethyl(MOE) adenosine; T005 is 2′-O-methoxyethyl(MOE)thymidine (or 5-methyl uridine); C005 is 2′-O-methoxyethyl(MOE)5-methyl-cytidine; G005 is 2′-O-methoxyethyl (MOE)guanosine; A007 is 2′-fluoroadenosine; U007 is 2′-fluorouridine; C007 is 2′-fluorocytidine; G007 is 2′-fluoroguanosine; p is a phosphodiester linkage; and p001 is a phosphorothioate linkage, and
[1157] X1085 is a ligand (L96),
   [1158] wherein the ligand (L96) is

[chemical structure]

wherein the dsRNAi agent has the following schematic:

[chemical structure]

or a pharmaceutically acceptable salt thereof (e.g., sodium salt form).

[1159] In some embodiments, a double stranded RNAi agent (e.g., siRNA agent) includes:
[1160] (i) a sense strand (SS) comprising a nucleotide sequence of

(SEQ ID NO: 806)
5′-C005p001T005p001A004pG004pA004pC004pC007pU004pG007pU007pT002pU004pU004pG
004pC004pU004pU004pU004pU004p001G005p001T005-3′;

[1161] (ii) an antisense strand (AS) comprising a nucleotide sequence of

(SEQ ID NO: 859)
5′-X033A1027p001C007p001A004pA004pA004pA007pG004pC004pA004pA004pA004pA004pC
004pA007pG004pG007pU004pC004pU004pA004pG004p001A004p001A004-3′;

and
[1162] (iii) a ligand (L96),
   wherein:
[1163] T002 is 2′-deoxy thymidine (dT); A004 is 2′-O-methyladenosine; U004 is 2′-O-methyluridine; C004 is 2′-O-methylcytidine; G004 is 2′-O-methylguanosine; A005 is 2′-O-methoxyethyl(MOE) adenosine; T005 is 2′-O-methoxyethyl(MOE)thymidine (or 5-methyl uridine); C005 is 2′-O-methoxyethyl(MOE)5-methyl-cytidine; G005 is 2′-O-methoxyethyl (MOE)guanosine; A007 is 2′-fluoroadenosine; U007 is 2′-fluorouridine; C007 is 2′-fluorocytidine; G007 is 2′-fluoroguanosine; X033A1027 is 5′-(E)-vinylphosphonate-2′-O-methyladenosine; p is a phosphodiester linkage; and p001 is a phosphorothioate linkage,
   wherein the ligand (L96) is

[chemical structure]

wherein the ligand is conjugated to 3′ end of the sense strand (SS) via a phosphodiester linkage to form the following schematic:

[chemical structure]

or a pharmaceutically acceptable salt thereof (e.g., sodium salt form).

[1164] In some embodiments, a double stranded RNAi agent (e.g., siRNA agent) includes:
[1165] (i) a sense strand (SS) consisting of a nucleotide sequence of:

(SEQ ID NO: 806)
5′-C005p001T005p001A004pG004pA004pC004pC007pU004pG007pU007pT002pU004pU004pG
004pC004pU004pU004pU004pU004p001G005p001T005-3′;

[1166] (ii) an antisense strand (AS) consisting of a nucleotide sequence of:

(SEQ ID NO: 859)
5′-X033A1027p001C007p001A004pA004pA004pA007pG004pC004pA004pA004pA004pA004pC
004pA007pG004pG007pU004pC004pU004pA004pG004p001A004p001A004-3′;

and
[1167] (iii) a ligand (L96),
   wherein:
[1168] T002 is 2′-deoxy thymidine (dT); A004 is 2′-O-methyladenosine; U004 is 2′-O-methyluridine; C004 is 2′-O-methylcytidine; G004 is 2′-O-methylguanosine; A005 is 2′-O-methoxyethyl(MOE) adenosine; T005 is 2′-O-methoxyethyl(MOE)thymidine (or 5-methyl uridine); C005 is 2′-O-methoxyethyl(MOE)5-methyl-cytidine; G005 is 2′-O-methoxyethyl (MOE)guanosine; A007 is 2′-fluoroadenosine; U007 is 2′-fluorouridine; C007 is 2′-fluorocytidine; G007 is 2′-fluoroguanosine; X033A1027 is 5′-(E)-vinylphosphonate-2′-O-methyladenosine; p is a phosphodiester linkage; and p001 is a phosphorothioate linkage,
   wherein the ligand (L96) is

[chemical structure]

wherein the ligand is conjugated to 3′ end of the sense strand (SS) via a phosphodiester linkage to form the following schematic:

[chemical structure]

or a pharmaceutically acceptable salt thereof (e.g., sodium salt form).

[1169] In some embodiments, a double stranded RNAi agent includes:
[1170] (i) a sense strand (SS) comprising

(SEQ ID NO: 947)
5′-C005p001T005p001A004pG004pA004pC004pC007pU004pG007pU007pT002pU004pU004pG
004pC004pU004pU004pU004pU004p001G005p001T005pX1085-3′;

and
[1171] (ii) an antisense strand (AS) comprising

(SEQ ID NO: 1004)
5′-X033A1027p001C007p001A004pA004pA004pA007pG004pC004pA004pA004pA004pA004pC
004pA007pG004pG007pU004pC004pU004pA004pG004p001A004p001A004-3′;

wherein:
[1172] T002 is 2′-deoxy thymidine (dT); A004 is 2′-O-methyladenosine; U004 is 2′-O-methyluridine; C004 is 2′-O-methylcytidine; G004 is 2′-O-methylguanosine; A005 is 2′-O-methoxyethyl(MOE) adenosine; T005 is 2′-O-methoxyethyl(MOE)thymidine (or 5-methyl uridine); C005 is 2′-O-methoxyethyl(MOE)5-methyl-cytidine; G005 is 2′-O-methoxyethyl (MOE)guanosine; A007 is 2′-fluoroadenosine; U007 is 2′-fluorouridine; C007 is 2′-fluorocytidine; G007 is 2′-fluoroguanosine; X033A1027 is 5′-(E)-vinylphosphonate-2′-O-methyladenosine; p is a phosphodiester linkage; and p001 is a phosphorothioate linkage, and
[1173] X1085 is a ligand (L96),
   [1174] wherein the ligand (L96) is

[chemical structure]

wherein the dsRNAi agent has the following schematic:

[chemical structure]

or a pharmaceutically acceptable salt thereof (e.g., sodium salt form).

[1175] In some embodiments, a double stranded RNAi agent includes:
[1176] (i) a sense strand (SS) consisting of

(SEQ ID NO: 947)
5′-C005p001T005p001A004pG004pA004pC004pC007pU004pG007pU007pT002pU004pU004pG
004pC004pU004pU004pU004pU004p001G005p001T005pX1085-3′;

and
[1177] (ii) an antisense strand (AS) consisting of

(SEQ ID NO: 1004)
5′-X033A1027p001C007p001A004pA004pA004pA007pG004pC004pA004pA004pA004pA004pC
004pA007pG004pG007pU004pC004pU004pA004pG004p001A004p001A004-3′;

wherein:
[1178] T002 is 2′-deoxy thymidine (dT); A004 is 2′-O-methyladenosine; U004 is 2′-O-methyluridine; C004 is 2′-O-methylcytidine; G004 is 2′-O-methylguanosine; A005 is 2′-O-methoxyethyl(MOE) adenosine; T005 is 2′-O-methoxyethyl(MOE)thymidine (or 5-methyl uridine); C005 is 2′-O-methoxyethyl(MOE)5-methyl-cytidine; G005 is 2′-O-methoxyethyl (MOE)guanosine; A007 is 2′-fluoroadenosine; U007 is 2′-fluorouridine; C007 is 2′-fluorocytidine; G007 is 2′-fluoroguanosine; X033A1027 is 5′-(E)-vinylphosphonate-2′-O-methyladenosine; p is a phosphodiester linkage; and p001 is a phosphorothioate linkage, and
[1179] X1085 is a ligand (L96),
   [1180] wherein the ligand (L96) is

[chemical structure]

wherein the dsRNAi agent has the following schematic:

[chemical structure]

or a pharmaceutically acceptable salt thereof (e.g., sodium salt form).

[1181] In some embodiments, a double stranded RNAi agent (e.g., siRNA agent) includes:
[1182] (i) a sense strand (SS) comprising a nucleotide sequence of

(SEQ ID NO: 811)
5′-C005p001T005p001A004pG004pA004pC004pC007pU004pG007pU007pT002pU004pU004pG
004pC004pU004pU004pU004pU004p001G005p001T005-3′;

[1183] (ii) an antisense strand (AS) comprising a nucleotide sequence of

(SEQ ID NO: 864)
5′-X033A1027p001C007p001A042pA004pA004pA007pG004pC004pA004pA004pA004pA004pC
004pA007pG004pG007pU004pC004pU004pA004pG004p001A004p001A004-3′;

and
[1184] a ligand (L96),
   wherein:
[1185] T002 is 2′-deoxy thymidine (dT); A004 is 2′-O-methyladenosine; U004 is 2′-O-methyluridine; C004 is 2′-O-methylcytidine; G004 is 2′-O-methylguanosine; A005 is 2′-O-methoxyethyl(MOE) adenosine; T005 is 2′-O-methoxyethyl(MOE)thymidine (or 5-methyl uridine); C005 is 2′-O-methoxyethyl(MOE)5-methyl-cytidine; G005 is 2′-O-methoxyethyl (MOE)guanosine; A007 is 2′-fluoroadenosine; U007 is 2′-fluorouridine; C007 is 2′-fluorocytidine; G007 is 2′-fluoroguanosine; A042 is adenosine TNA; X033A1027 is 5′-(E)-vinylphosphonate-2′-O-methyladenosine; p is a phosphodiester linkage; and p001 is a phosphorothioate linkage,
   wherein the ligand (L96) is

[chemical structure]

wherein the ligand is conjugated to 3′ end of the sense strand (SS) via a phosphodiester linkage to form the following schematic:

[chemical structure]

or a pharmaceutically acceptable salt thereof (e.g., sodium salt form).

[1186] In some embodiments, a double stranded RNAi agent (e.g., siRNA agent) includes:
[1187] (i) a sense strand (SS) consisting of a nucleotide sequence of:

(SEQ ID NO: 811)
5′-C005p001T005p001A004pG004pA004pC004pC007pU004pG007pU007pT002pU004pU004pG
004pC004pU004pU004pU004pU004p001G005p001T005-3′;

[1188] (ii) an antisense strand (AS) consisting of a nucleotide sequence of:

(SEQ ID NO: 864)
5′-X033A1027p001C007p001A042pA004pA004pA007pG004pC004pA004pA004pA004pA004pC
004pA007pG004pG007pU004pC004pU004pA004pG004p001A004p001A004-3′;

and
[1189] a ligand (L96),
   wherein:
[1190] T002 is 2′-deoxy thymidine (dT); A004 is 2′-O-methyladenosine; U004 is 2′-O-methyluridine; C004 is 2′-O-methylcytidine; G004 is 2′-O-methylguanosine; A005 is 2′-O-methoxyethyl(MOE) adenosine; T005 is 2′-O-methoxyethyl(MOE)thymidine (or 5-methyl uridine); C005 is 2′-O-methoxyethyl(MOE)5-methyl-cytidine; G005 is 2′-O-methoxyethyl (MOE)guanosine; A007 is 2′-fluoroadenosine; U007 is 2′-fluorouridine; C007 is 2′-fluorocytidine; G007 is 2′-fluoroguanosine; A042 is adenosine TNA; X033A1027 is 5′-(E)-vinylphosphonate-2′-O-methyladenosine; p is a phosphodiester linkage; and p001 is a phosphorothioate linkage,
   wherein the ligand (L96) is

[chemical structure]

wherein the ligand is conjugated to 3′ end of the sense strand (SS) via a phosphodiester linkage to form the following schematic:

[chemical structure]

or a pharmaceutically acceptable salt thereof (e.g., sodium salt form).

[1191] In some embodiments, a double stranded RNAi agent includes:
[1192] (i) a sense strand (SS) comprising

(SEQ ID NO: 948)
5′-C005p001T005p001A004pG004pA004pC004pC007pU004pG007pU007pT002pU004pU004pG
004pC004pU004pU004pU004pU004p001G005p001T005pX1085-3′;

and
[1193] (ii) an antisense strand (AS) comprising

(SEQ ID NO: 1005)
5′-X033A1027p001C007p001A042pA004pA004pA007pG004pC004pA004pA004pA004pA004pC
004pA007pG004pG007pU004pC004pU004pA004pG004p001A004p001A004-3′;

wherein:
[1194] T002 is 2′-deoxy thymidine (dT); A004 is 2′-O-methyladenosine; U004 is 2′-O-methyluridine; C004 is 2′-O-methylcytidine; G004 is 2′-O-methylguanosine; A005 is 2′-O-methoxyethyl(MOE) adenosine; T005 is 2′-O-methoxyethyl(MOE)thymidine (or 5-methyl uridine); C005 is 2′-O-methoxyethyl(MOE)5-methyl-cytidine; G005 is 2′-O-methoxyethyl (MOE)guanosine; A007 is 2′-fluoroadenosine; U007 is 2′-fluorouridine; C007 is 2′-fluorocytidine; G007 is 2′-fluoroguanosine; A042 is adenosine TNA; X033A1027 is 5′-(E)-vinylphosphonate-2′-O-methyladenosine; p is a phosphodiester linkage; and p001 is a phosphorothioate linkage, and
[1195] X1085 is a ligand (L96),
   [1196] wherein the ligand (L96) is

[chemical structure]

wherein the dsRNAi agent has the following schematic:

[chemical structure]

or a pharmaceutically acceptable salt thereof (e.g., sodium salt form).

[1197] In some embodiments, a double stranded RNAi agent includes:
[1198] (i) a sense strand (SS) consisting of

(SEQ ID NO: 948)
5′-C005p001T005p001A004pG004pA004pC004pC007pU004pG007pU007pT002pU004pU004pG
004pC004pU004pU004pU004pU004p001G005p001T005pX1085-3′;

and
[1199] (ii) an antisense strand (AS) consisting of

(SEQ ID NO: 1005)
5′-X033A1027p001C007p001A042pA004pA004pA007pG004pC004pA004pA004pA004pA004pC
004pA007pG004pG007pU004pC004pU004pA004pG004p001A004p001A004-3′;

wherein:
[1200] T002 is 2′-deoxy thymidine (dT); A004 is 2′-O-methyladenosine; U004 is 2′-O-methyluridine; C004 is 2′-O-methylcytidine; G004 is 2′-O-methylguanosine; A005 is 2′-O-methoxyethyl(MOE) adenosine; T005 is 2′-O-methoxyethyl(MOE)thymidine (or 5-methyl uridine); C005 is 2′-O-methoxyethyl(MOE)5-methyl-cytidine; G005 is 2′-O-methoxyethyl (MOE)guanosine; A007 is 2′-fluoroadenosine; U007 is 2′-fluorouridine; C007 is 2′-fluorocytidine; G007 is 2′-fluoroguanosine; A042 is adenosine TNA; X033A1027 is 5′-(E)-vinylphosphonate-2′-O-methyladenosine; p is a phosphodiester linkage; and p001 is a phosphorothioate linkage, and
[1201] X1085 is a ligand (L96),
   [1202] wherein the ligand (L96) is

[chemical structure]

wherein the dsRNAi agent has the following schematic:

[chemical structure]

or a pharmaceutically acceptable salt thereof (e.g., sodium salt form).

[1203] In some embodiments, a double stranded RNAi agent (e.g., siRNA agent) includes:
[1204] (i) a sense strand (SS) comprising a nucleotide sequence of

(SEQ ID NO: 813)
5′-C042p001U042p001A004pG004pA004pC004pC007pU004pG007pU007pT002pU004pU004pG
004pC004pU004pU004pU004pU004p001G042p001U042-3′;

[1205] (ii) an antisense strand (AS) comprising a nucleotide sequence of

(SEQ ID NO: 866)
5′-X033A1027p001C007p001A004pA004pA004pA007pG004pC004pA004pA004pA004pA004pC
004pA007pG004pG007pU004pC004pU004pA004pG004p001A004p001A004-3′;

and
[1206] (iii) a ligand (L96),
   wherein:
[1207] T002 is 2′-deoxy thymidine (dT); A004 is 2′-O-methyladenosine; U004 is 2′-O-methyluridine; C004 is 2′-O-methylcytidine; G004 is 2′-O-methylguanosine; A005 is 2′-O-methoxyethyl(MOE) adenosine; T005 is 2′-O-methoxyethyl(MOE)thymidine (or 5-methyl uridine); C005 is 2′-O-methoxyethyl(MOE)5-methyl-cytidine; G005 is 2′-O-methoxyethyl (MOE)guanosine; A007 is 2′-fluoroadenosine; U007 is 2′-fluorouridine; C007 is 2′-fluorocytidine; G007 is 2′-fluoroguanosine; A042 is adenosine TNA; U042 is uridine TNA; C042 is cytidine TNA; G042 is guanosine TNA; X033A1027 is 5′-(E)-vinylphosphonate-2′-O-methyladenosine; p is a phosphodiester linkage; and p001 is a phosphorothioate linkage,
   wherein the ligand (L96) is

[chemical structure]

wherein the ligand is conjugated to 3′ end of the sense strand (SS) via a phosphodiester linkage to form the following schematic:

[chemical structure]

or a pharmaceutically acceptable salt thereof (e.g., sodium salt form).

[1208] In some embodiments, a double stranded RNAi agent (e.g., siRNA agent) includes:
[1209] (i) a sense strand (SS) consisting of a nucleotide sequence of:

(SEQ ID NO: 813)
5′-C042p001U042p001A004pG004pA004pC004pC007pU004pG007pU007pT002pU004pU004pG
004pC004pU004pU004pU004pU004p001G042p001U042-3′;

[1210] (ii) an antisense strand (AS) consisting of a nucleotide sequence of:

(SEQ ID NO: 866)
5′-X033A1027p001C007p001A004pA004pA004pA007pG004pC004pA004pA004pA004pA004pC
004pA007pG004pG007pU004pC004pU004pA004pG004p001A004p001A004-3′;

and
[1211] (iii) a ligand (L96),
   wherein:
[1212] T002 is 2′-deoxy thymidine (dT); A004 is 2′-O-methyladenosine; U004 is 2′-O-methyluridine; C004 is 2′-O-methylcytidine; G004 is 2′-O-methylguanosine; A005 is 2′-O-methoxyethyl(MOE) adenosine; T005 is 2′-O-methoxyethyl(MOE)thymidine (or 5-methyl uridine); C005 is 2′-O-methoxyethyl(MOE)5-methyl-cytidine; G005 is 2′-O-methoxyethyl (MOE)guanosine; A007 is 2′-fluoroadenosine; U007 is 2′-fluorouridine; C007 is 2′-fluorocytidine; G007 is 2′-fluoroguanosine; A042 is adenosine TNA; U042 is uridine TNA; C042 is cytidine TNA; G042 is guanosine TNA; X033A1027 is 5′-(E)-vinylphosphonate-2′-O-methyladenosine; p is a phosphodiester linkage; and p001 is a phosphorothioate linkage, wherein the ligand (L96) is

[chemical structure]

wherein the ligand is conjugated to 3′ end of the sense strand (SS) via a phosphodiester linkage to form the following schematic:

[chemical structure]

or a pharmaceutically acceptable salt thereof (e.g., sodium salt form).

[1213] In some embodiments, a double stranded RNAi agent includes:
[1214] (i) a sense strand (SS) comprising

(SEQ ID NO: 949)
5′-C042p001U042p001A004pG004pA004pC004pC007pU004pG007pU007pT002pU004pU004pG
004pC004pU004pU004pU004pU004p001G042p001U042pX1085-3′;

and
[1215] (ii) an antisense strand (AS) comprising

(SEQ ID NO: 1006)
5′-X033A1027p001C007p001A004pA004pA004pA007pG004pC004pA004pA004pA004pA004pC
004pA007pG004pG007pU004pC004pU004pA004pG004p001A004p001A004-3′;

wherein:
[1216] T002 is 2′-deoxy thymidine (dT); A004 is 2′-O-methyladenosine; U004 is 2′-O-methyluridine; C004 is 2′-O-methylcytidine; G004 is 2′-O-methylguanosine; A005 is 2′-O-methoxyethyl(MOE) adenosine; T005 is 2′-O-methoxyethyl(MOE)thymidine (or 5-methyl uridine); C005 is 2′-O-methoxyethyl(MOE)5-methyl-cytidine; G005 is 2′-O-methoxyethyl (MOE)guanosine; A007 is 2′-fluoroadenosine; U007 is 2′-fluorouridine; C007 is 2′-fluorocytidine; G007 is 2′-fluoroguanosine; A042 is adenosine TNA; U042 is uridine TNA; C042 is cytidine TNA; G042 is guanosine TNA; X033A1027 is 5′-(E)-vinylphosphonate-2′-O-methyladenosine; p is a phosphodiester linkage; and p001 is a phosphorothioate linkage, and
[1217] X1085 is a ligand (L96),
   [1218] wherein the ligand (L96) is

[chemical structure]

wherein the dsRNAi agent has the following schematic:

[chemical structure]

or a pharmaceutically acceptable salt thereof (e.g., sodium salt form).

[1219] In some embodiments, a double stranded RNAi agent includes:
[1220] (i) a sense strand (SS) consisting of

(SEQ ID NO: 949)
5′-C042p001U042p001A004pG004pA004pC004pC007pU004pG007pU007pT002pU004pU004pG
004pC004pU004pU004pU004pU004p001G042p001U042pX1085-3′;

and
[1221] (ii) an antisense strand (AS) consisting of

(SEQ ID NO: 1006)
5′-X033A1027p001C007p001A004pA004pA004pA007pG004pC004pA004pA004pA004pA004pC
004pA007pG004pG007pU004pC004pU004pA004pG004p001A004p001A004-3′;

wherein:
[1222] T002 is 2′-deoxy thymidine (dT); A004 is 2′-O-methyladenosine; U004 is 2′-O-methyluridine; C004 is 2′-O-methylcytidine; G004 is 2′-O-methylguanosine; A005 is 2′-O-methoxyethyl(MOE) adenosine; T005 is 2′-O-methoxyethyl(MOE)thymidine (or 5-methyl uridine); C005 is 2′-O-methoxyethyl(MOE)5-methyl-cytidine; G005 is 2′-O-methoxyethyl (MOE)guanosine; A007 is 2′-fluoroadenosine; U007 is 2′-fluorouridine; C007 is 2′-fluorocytidine; G007 is 2′-fluoroguanosine; A042 is adenosine TNA; U042 is uridine TNA; C042 is cytidine TNA; G042 is guanosine TNA; X033A1027 is 5′-(E)-vinylphosphonate-2′-O-methyladenosine; p is a phosphodiester linkage; and p001 is a phosphorothioate linkage, and
[1223] X1085 is a ligand (L96),
   [1224] wherein the ligand (L96) is

[chemical structure]

wherein the dsRNAi agent has the following schematic:

[chemical structure]

or a pharmaceutically acceptable salt thereof (e.g., sodium salt form).

[1225] In some embodiments, a double stranded RNAi agent (e.g., siRNA agent) includes:
[1226] (i) a sense strand (SS) comprising a nucleotide sequence of

(SEQ ID NO: 830)
5′-G005p001T005p001U004pU004pU004pG004pC007pU004pU007pU007pU007pG004pU004pA
004pA004pC004pU004pU004pG004p001A005p001A005-3′;

[1227] (ii) an antisense strand (AS) comprising a nucleotide sequence of

(SEQ ID NO: 883)
5′-X033U1027p001U007p001C004pA004pA004pG007pU004pU004pA004pC004pA004pA004
pA004pA007pG004pC007pA004pA004pA004pA004pC004p001A004p001G004-3′;

and
[1228] (iii) a ligand (L96),
   wherein:
[1229] T002 is 2′-deoxy thymidine (dT); A004 is 2′-O-methyladenosine; U004 is 2′-O-methyluridine; C004 is 2′-O-methylcytidine; G004 is 2′-O-methylguanosine; A005 is 2′-O-methoxyethyl(MOE) adenosine; T005 is 2′-O-methoxyethyl(MOE)thymidine (or 5-methyl uridine); C005 is 2′-O-methoxyethyl(MOE)5-methyl-cytidine; G005 is 2′-O-methoxyethyl (MOE)guanosine; A007 is 2′-fluoroadenosine; U007 is 2′-fluorouridine; C007 is 2′-fluorocytidine; G007 is 2′-fluoroguanosine; X033U1027 is 5′-(E)-vinylphosphonate-2′-O-methyluridine; p is a phosphodiester linkage; and p001 is a phosphorothioate linkage,
   wherein the ligand (L96) is

[chemical structure]

wherein the ligand is conjugated to 3′ end of the sense strand (SS) via a phosphodiester linkage to form the following schematic:

[chemical structure]

or a pharmaceutically acceptable salt thereof (e.g., sodium salt form).

[1230] In some embodiments, a double stranded RNAi agent (e.g., siRNA agent) includes:
[1231] (i) a sense strand (SS) consisting of a nucleotide sequence of:

(SEQ ID NO: 830)
5′-G005p001T005p001U004pU004pU004pG004pC007pU004pU007pU007pU007pG004pU004
pA004pA004pC004pU004pU004pG004p001A005p001A005-3′;

[1232] (ii) an antisense strand (AS) consisting of a nucleotide sequence of:

(SEQ ID NO: 883)
5′-X033U1027p001U007p001C004pA004pA004pG007pU004pU004pA004pC004pA004pA004pA
004pA007pG004pC007pA004pA004pA004pA004pC004p001A004p001G004-3′;

and
[1233] (iii) a ligand (L96),
   wherein:
[1234] T002 is 2′-deoxy thymidine (dT); A004 is 2′-O-methyladenosine; U004 is 2′-O-methyluridine; C004 is 2′-O-methylcytidine; G004 is 2′-O-methylguanosine; A005 is 2′-O-methoxyethyl(MOE) adenosine; T005 is 2′-O-methoxyethyl(MOE)thymidine (or 5-methyl uridine); C005 is 2′-O-methoxyethyl(MOE)5-methyl-cytidine; G005 is 2′-O-methoxyethyl (MOE)guanosine; A007 is 2′-fluoroadenosine; U007 is 2′-fluorouridine; C007 is 2′-fluorocytidine; G007 is 2′-fluoroguanosine; X033U1027 is 5′-(E)-vinylphosphonate-2′-O-methyluridine; p is a phosphodiester linkage; and p001 is a phosphorothioate linkage,
   wherein the ligand (L96) is

[chemical structure]

wherein the ligand is conjugated to 3′ end of the sense strand (SS) via a phosphodiester linkage to form the following schematic:

[chemical structure]

or a pharmaceutically acceptable salt thereof (e.g., sodium salt form).

[1235] In some embodiments, a double stranded RNAi agent includes:
[1236] (i) a sense strand (SS) comprising

(SEQ ID NO: 950)
5′-G005p001T005p001U004pU004pU004pG004pC007pU004pU007pU007pU007pG004pU004pA
004pA004pC004pU004pU004pG004p001A005p001A005pX1085-3′;

and
[1237] (ii) an antisense strand (AS) comprising

(SEQ ID NO: 1007)
5′-X033U1027p001U007p001C004pA004pA004pG007pU004pU004pA004pC004pA004pA004pA
004pA007pG004pC007pA004pA004pA004pA004pC004p001A004p001G004-3′;

wherein:
[1238] T002 is 2′-deoxy thymidine (dT); A004 is 2′-O-methyladenosine; U004 is 2′-O-methyluridine; C004 is 2′-O-methylcytidine; G004 is 2′-O-methylguanosine; A005 is 2′-O-methoxyethyl(MOE) adenosine; T005 is 2′-O-methoxyethyl(MOE)thymidine (or 5-methyl uridine); C005 is 2′-O-methoxyethyl(MOE)5-methyl-cytidine; G005 is 2′-O-methoxyethyl (MOE)guanosine; A007 is 2′-fluoroadenosine; U007 is 2′-fluorouridine; C007 is 2′-fluorocytidine; G007 is 2′-fluoroguanosine; X033U1027 is 5′-(E)-vinylphosphonate-2′-O-methyluridine; p is a phosphodiester linkage; and p001 is a phosphorothioate linkage, and
[1239] X1085 is a ligand (L96),
   [1240] wherein the ligand (L96) is

[chemical structure]

wherein the dsRNAi agent has the following schematic:

[chemical structure]

or a pharmaceutically acceptable salt thereof (e.g., sodium salt form).

[1241] In some embodiments, a double stranded RNAi agent includes:
[1242] (i) a sense strand (SS) consisting of

(SEQ ID NO: 950)
5′-G005p001T005p001U004pU004pU004pG004pC007pU004pU007pU007pU007pG004pU004pA
004pA004pC004pU004pU004pG004p001A005p001A005pX1085-3′;

and
[1243] (ii) an antisense strand (AS) consisting of

(SEQ ID NO: 1007)
5′-X033U1027p001U007p001C004pA004pA004pG007pU004pU004pA004pC004pA004pA004pA
004pA007pG004pC007pA004pA004pA004pA004pC004p001A004p001G004-3′;

wherein:
[1244] T002 is 2′-deoxy thymidine (dT); A004 is 2′-O-methyladenosine; U004 is 2′-O-methyluridine; C004 is 2′-O-methylcytidine; G004 is 2′-O-methylguanosine; A005 is 2′-O-methoxyethyl(MOE) adenosine; T005 is 2′-O-methoxyethyl(MOE)thymidine (or 5-methyl uridine); C005 is 2′-O-methoxyethyl(MOE)5-methyl-cytidine; G005 is 2′-O-methoxyethyl (MOE)guanosine; A007 is 2′-fluoroadenosine; U007 is 2′-fluorouridine; C007 is 2′-fluorocytidine; G007 is 2′-fluoroguanosine; X033U1027 is 5′-(E)-vinylphosphonate-2′-O-methyluridine; p is a phosphodiester linkage; and p001 is a phosphorothioate linkage, and
[1245] X1085 is a ligand (L96),
   [1246] wherein the ligand (L96) is

[chemical structure]

wherein the dsRNAi agent has the following schematic:

[chemical structure]

or a pharmaceutically acceptable salt thereof (e.g., sodium salt form).

[1247] In some embodiments, a double stranded RNAi agent (e.g., siRNA agent) includes:
[1248] (i) a sense strand (SS) comprising a nucleotide sequence of

(SEQ ID NO: 1016)
5′-C005p001T005p001A004pG004pA004pC004pC007pU004pG007pU007pT002pU004pU004pG
004pC004pU004pU004pU004pU004p001G005p001T005-3′;

[1249] (ii) an antisense strand (AS) comprising a nucleotide sequence of

(SEQ ID NO: 1022)
5′-X033A1027p001C007p001A042pA004pA004pA042pG004pC004pA004pA004pA004pA004pC
004pA007pG004pG007pU004pC004pU004pA004pG004p001A004p001A004-3′;

and
[1250] (iii) a ligand (L96),
   wherein:
[1251] T002 is 2′-deoxy thymidine (dT); A004 is 2′-O-methyladenosine; U004 is 2′-O-methyluridine; C004 is 2′-O-methylcytidine; G004 is 2′-O-methylguanosine; T005 is 2′-O-methoxyethyl(MOE)thymidine (or 5-methyl uridine); C005 is 2′-O-methoxyethyl(MOE)5-methyl-cytidine; G005 is 2′-O-methoxyethyl (MOE)guanosine; A007 is 2′-fluoroadenosine; U007 is 2′-fluorouridine; C007 is 2′-fluorocytidine; G007 is 2′-fluoroguanosine; A042 is adenosine TNA; X033A1027 is 5′-(E)-vinylphosphonate-2′-O-methyladenosine; p is a phosphodiester linkage; and p001 is a phosphorothioate linkage,
   wherein the ligand (L96) is

[chemical structure]

wherein the ligand is conjugated to 3′ end of the sense strand (SS) via a phosphodiester linkage to form the following schematic

[chemical structure]

or a pharmaceutically acceptable salt thereof (e.g., sodium salt form).

[1252] In some embodiments, a double stranded RNAi agent (e.g., siRNA agent) includes:
[1253] (i) a sense strand (SS) consisting of a nucleotide sequence of:

(SEQ ID NO: 1016)
5′-C005p001T005p001A004pG004pA004pC004pC007pU004pG007pU007pT002pU004pU004pG
004pC004pU004pU004pU004pU004p001G005p001T005-3′;

[1254] (ii) an antisense strand (AS) consisting of a nucleotide sequence of:

(SEQ ID NO: 1022)
5′-X033A1027p001C007p001A042pA004pA004pA042pG004pC004pA004pA004pA004pA004pC
004pA007pG004pG007pU004pC004pU004pA004pG004p001A004p001A004-3′;

and
[1255] (iii) a ligand (L96),
   wherein:
[1256] T002 is 2′-deoxy thymidine (dT); A004 is 2′-O-methyladenosine; U004 is 2′-O-methyluridine; C004 is 2′-O-methylcytidine; G004 is 2′-O-methylguanosine; T005 is 2′-O-methoxyethyl(MOE)thymidine (or 5-methyl uridine); C005 is 2′-O-methoxyethyl(MOE)5-methyl-cytidine; G005 is 2′-O-methoxyethyl (MOE)guanosine; A007 is 2′-fluoroadenosine; U007 is 2′-fluorouridine; C007 is 2′-fluorocytidine; G007 is 2′-fluoroguanosine; A042 is adenosine TNA; X033A1027 is 5′-(E)-vinylphosphonate-2′-O-methyladenosine; p is a phosphodiester linkage; and p001 is a phosphorothioate linkage,
   wherein the ligand (L96) is

[chemical structure]

wherein the ligand is conjugated to 3′ end of the sense strand (SS) via a phosphodiester linkage to form the following schematic:

[chemical structure]

or a pharmaceutically acceptable salt thereof (e.g., sodium salt form).

[1257] In some embodiments, a double stranded RNAi agent includes:
[1258] (i) a sense strand (SS) comprising

(SEQ ID NO: 1028)
5′-C005p001T005p001A004pG004pA004pC004pC007pU004pG007pU007pT002pU004pU004pG
004pC004pU004pU004pU004pU004p001G005p001T005pX1085-3′;

and
[1259] (ii) an antisense strand (AS) comprising

(SEQ ID NO: 1034)
5′-X033A1027p001C007p001A042pA004pA004pA042pG004pC004pA004pA004pA004pA004pC
004pA007pG004pG007pU004pC004pU004pA004pG004p001A004p001A004-3′;

wherein:
[1260] T002 is 2′-deoxy thymidine (dT); A004 is 2′-O-methyladenosine; U004 is 2′-O-methyluridine; C004 is 2′-O-methylcytidine; G004 is 2′-O-methylguanosine; T005 is 2′-O-methoxyethyl(MOE)thymidine (or 5-methyl uridine); C005 is 2′-O-methoxyethyl(MOE)5-methyl-cytidine; G005 is 2′-O-methoxyethyl (MOE)guanosine; A007 is 2′-fluoroadenosine; U007 is 2′-fluorouridine; C007 is 2′-fluorocytidine; G007 is 2′-fluoroguanosine; A042 is adenosine TNA; X033A1027 is 5′-(E)-vinylphosphonate-2′-O-methyladenosine; p is a phosphodiester linkage; and p001 is a phosphorothioate linkage, and
[1261] X1085 is a ligand (L96),
   [1262] wherein the ligand (L96) is

[chemical structure]

wherein the dsRNAi agent has the following schematic:

[chemical structure]

or a pharmaceutically acceptable salt thereof (e.g., sodium salt form).

[1263] In some embodiments, a double stranded RNAi agent includes:
[1264] (i) a sense strand (SS) consisting of

(SEQ ID NO: 1028)
5′-C005p001T005p001A004pG004pA004pC004pC007pU004pG007pU007pT002pU004pU004pG
004pC004pU004pU004pU004pU004p001G005p001T005pX1085-3′;

and
[1265] (ii) an antisense strand (AS) consisting of

(SEQ ID NO: 1034)
5′-X033A1027p001C007p001A042pA004pA004pA042pG004pC004pA004pA004pA004pA004pC
004pA007pG004pG007pU004pC004pU004pA004pG004p001A004p001A004-3′;

wherein:
[1266] T002 is 2′-deoxy thymidine (dT); A004 is 2′-O-methyladenosine; U004 is 2′-O-methyluridine; C004 is 2′-O-methylcytidine; G004 is 2′-O-methylguanosine; T005 is 2′-O-methoxyethyl(MOE)thymidine (or 5-methyl uridine); C005 is 2′-O-methoxyethyl(MOE)5-methyl-cytidine; G005 is 2′-O-methoxyethyl (MOE)guanosine; A007 is 2′-fluoroadenosine; U007 is 2′-fluorouridine; C007 is 2′-fluorocytidine; G007 is 2′-fluoroguanosine; A042 is adenosine TNA; X033A1027 is 5′-(E)-vinylphosphonate-2′-O-methyladenosine; p is a phosphodiester linkage; and p001 is a phosphorothioate linkage, and
[1267] X1085 is a ligand (L96),
   [1268] wherein the ligand (L96) is

[chemical structure]

wherein the dsRNAi agent has the following schematic:

[chemical structure]

or a pharmaceutically acceptable salt thereof (e.g., sodium salt form).

### Pharmaceutical Compositions

[1269] Also provided herein is a pharmaceutical composition (“composition”) including the dsRNAi agents described herein (including all embodiments (e.g., Tables, Figures and Examples, and etc.) and a pharmaceutically acceptable carrier or excipient.

### Formulation

[1270] The pharmaceutical composition may be prepared and administered in a wide variety of dosage formulations. dsRNAi agents described herein may be administered orally, rectally, or by injection (e.g. intravenously, intramuscularly, intracutaneously, subcutaneously, intraduodenally, or intraperitoneally). In certain embodiments, the dsRNAi agents are formulated for injection (e.g. intravenously, intramuscularly, intracutaneously, subcutaneously, intraduodenally, or intraperitoneally). In certain embodiments, the dsRNAi agents are administered subcutaneously. In certain embodiments, the dsRNAi agents are administered intravenously.

[1271] For preparing pharmaceutical compositions from the dsRNAi agents described herein, the pharmaceutically acceptable carriers or excipients may be liquid. Particularly, when parenteral application (e.g., subcutaneously or intravenously administered) is needed or desired, particularly suitable admixtures for the compounds included in the pharmaceutical composition may be injectable, sterile solutions, oily or aqueous solutions, as well as suspensions, emulsions, or implants, including suppositories. In certain aspects, for parenteral injection (e.g., subcutaneous or intravenous administration), liquid form preparations may include solutions (e.g., a sterile aqueous solution), suspensions, emulsions (e.g., water solutions), aqueous or crystalline compositions, liposomal formulations, and micellar formulations. In some embodiments, the liquid form preparation is for an injectable device.

[1272] The pharmaceutically acceptable carriers or excipients can include buffers to adjust the pH to a desirable range for intravenous use. In some embodiments, the liquid form preparations for intravenous use may include a buffer solution containing acetate, citrate, prolamine, carbonate, phosphate, borate, sulfate, or any combination thereof, for example, the buffer solution is phosphate buffered saline (PBS). In some embodiments, the buffer solution may further include an agent to control the osmolarity, for example, proteins, peptides, amino acids, non-metabolized polymers, vitamins, ions, sugars, metabolites, organic acids, lipids, or salts (e.g., sodium chloride or potassium chloride).

[1273] In some embodiments, pharmaceutical compositions containing dsRNAi agent described herein include additional components to aid in delivery, stability, efficacy, or reduction of immunogenicity.

[1274] The pharmaceutical composition may include compositions wherein the active ingredient dsRNAi agent is contained in a therapeutically effective amount, i.e., in an amount effective to achieve its intended purpose (e.g., gene-silencing (e.g., inhibiting, downregulating, or suppressing of the gene) the expression of PCSK9 in a subject, or lowering LDL-C level in a subject). The actual amount effective for a particular application will depend, inter aim, on the condition being treated.

[1275] The pharmaceutical compositions described herein typically include a therapeutically effective amount of dsRNAi agents described herein. In some embodiments, a therapeutically effective amount of the dsRNAi agent targeting the PCSK9 (e.g., human PCSK9) can reduce PCSK9 mRNA levels in a treated cell or subject by at least about 10%, about 15%, about 20%, about 25%, about 30%, about 35%, about 40%, about 45%, about 50%, about 55%, about 60%, about 65%, about 70%, about 75%, about 80%, about 85%, about 90% or about 95% compared to non-treated or control cell or subject. In some embodiments, a therapeutically effective amount of an RNAi agent targeting PCSK9 can reduce PCSK9 protein levels in a treated cell or subject by at least about 10%, about 15%, about 20%, about 25%, about 30%, about 35%, about 40%, about 45%, about 50%, about 55%, about 60%, about 65%, about 70%, about 75%, about 80%, about 85%, about 90% or about 95% compared to non-treated or control cell or subject. In some embodiments, a therapeutically effective amount of an RNAi agent targeting PCSK9 can reduce PCSK9 protein levels in a treated cell or subject by at least about 10%, about 15%, about 20%, about 25%, about 30%, about 35%, about 40%, about 45%, about 50%, about 55%, about 60%, about 65%, about 70%, about 75%, about 80%, about 85%, about 90% or about 95% compared to non-treated or control cell or subject.

[1276] A given clinical treatment (e.g., lowering LCL-C level in blood or serum of a subject) is considered effective where there is at least about 10%, about 15%, about 20%, about 25%, about 30%, about 35%, about 40%, about 45%, about 50%, about 55%, about 60%, about 65%, about 70%, about 75%, about 80%, about 85%, about 90% or about 95% reduction in a measurable parameter associated with a disease or disorder. In some embodiments, the given clinical treatment (e.g., lowering LCL-C level in blood or serum of a subject) is considered effective where there is at least about 10%, about 15%, about 20%, about 25%, about 30%, about 35%, about 40%, about 45%, about 50%, about 55%, about 60%, about 65%, about 70%, about 75%, about 80%, about 85%, about 90% or about 95% reduction in a measurable parameter associated with a disease or disorder. In some embodiments, therapeutically effective amount of a dsRNAi agent for the treatment of that disease or disorder (e.g., lowering LCL-C level in blood or serum of a subject) is the amount necessary to effect at least about 10%, about 15%, about 20%, about 25%, about 30%, about 35%, about 40%, about 45%, about 50%, about 55%, about 60%, about 65%, about 70%, about 75%, about 80%, about 85%, about 90% or about 95% at least about 10%, about 15%, about 20%, about 25%, about 30%, about 35%, about 40%, about 45%, about 50%, about 55%, about 60%, about 65%, about 70%, about 75%, about 80%, about 85%, about 90% or about 95% reduction, respectively, in that parameter. In some embodiments, therapeutically effective amount of a dsRNAi agent for the treatment of that disease or disorder (e.g., lowering LCL-C level in blood or serum of a subject) is the amount necessary to effect at least about 40%, about 45%, about 50%, about 55%, about 60%, about 65%, about 70%, about 75%, about 80%, about 85%, or about 90%, respectively, in that parameter.

[1277] The dosage and frequency (single or multiple doses) of compounds administered can vary depending upon a variety of factors, including route of administration; size, age, sex, health, body weight, body mass index, and diet of the recipient; nature and extent of symptoms of the disease being treated; presence of other diseases or other health-related problems; kind of concurrent treatment; and complications from any disease or treatment regimen. Other therapeutic regimens or agents can be used in conjunction with the methods and compounds disclosed herein.

[1278] Dosage amounts and intervals can be adjusted individually to provide levels of the administered dsRNAi agents that is effective for the particular clinical indication being treated. This will provide a therapeutic regimen that is commensurate with the severity of the individual's disease state.

[1279] The effective prophylactic or therapeutic treatment regimen as described herein can be planned that does not cause substantial toxicity and yet is entirely effective to treat the clinical symptoms demonstrated by the particular patient. This planning should involve the careful choice of active compound by considering factors such as compound potency, relative bioavailability, patient body weight, presence and severity of adverse side effects, preferred mode of administration, and the toxicity profile of the selected agent.

### Toxicity

[1280] The ratio between toxicity and therapeutic effect for the dsRNAi agent is its therapeutic index and can be expressed as the ratio between LD₅₀ (the amount of compound lethal in 50% of the population) and ED₅₀ (the amount of compound effective in 50% of the population). The dsRNAi agents that exhibit high therapeutic indices are preferred. Therapeutic index data obtained from cell culture assays and/or animal studies can be used in formulating a range of dosages for use in humans. The dosage of such dsRNAi agents preferably lies within a range of plasma concentrations that include the ED₅₀ with little or no toxicity. The dosage may vary within this range depending upon the dosage form employed and the route of administration utilized. The exact formulation, route of administration, and dosage may also be chosen by the individual physician in view of the patient's condition and the particular method in which the dsRNAi agents are used.

### Methods of Use

[1281] The methods and compositions of the present disclosure, e.g., the methods and PCSK9 RNAi agent compositions, can be used in any appropriate dosage and/or composition described herein or known in the art, as well as with any suitable route of administration described herein or known in the art. Any aspects or embodiments disclosed herein that are not mutually exclusive can be combined.

[1282] In an aspect, the disclosure provides a method of or a use for inhibiting expression of PCSK9 (e.g., gene or protein) in a subject. The method or the use includes administering to the subject the dsRNAi agent or a pharmaceutical composition as described herein. In some embodiments, the method includes administering to the subject a therapeutically effective amount of the dsRNAi agent or a pharmaceutical composition as described herein.

[1283] In an aspect, the disclosure provides a method of, or a use for inhibiting expression of PCSK9 (e.g., gene or protein) in a subject. The method or the use includes administering to the subject the dsRNAi agent including the siRNA selected from Tables 1-2 and 5-6, or a pharmaceutical composition thereof. In some embodiments, the method includes administering to the subject a therapeutically effective amount of the dsRNAi agent including the siRNA selected from Tables 1-2 and 5-6, or a pharmaceutical composition thereof.

[1284] In certain aspects, the disclosure provides a method of, or for a use for treating or preventing the PCSK9-associated disorder or disease by reduction in PCSK9 expression. The method or the use includes administering to the subject the dsRNAi agent including the siRNA selected from Tables 1-2 and 5-6, or a pharmaceutical composition thereof. In some embodiments, the method includes administering to the subject a therapeutically effective amount of the dsRNAi agent including the siRNA selected from Tables 1-2 and 5-6, or a pharmaceutical composition thereof. The level of PCSK9 may be measured or detected in a sample (e.g., a blood, serum, or liver tissue) from the subject. In certain aspects, the method may include treating or preventing one or more symptoms in the subject having the PCSK9-associated disorder or disease. In some embodiments, the methods may decrease PCSK9 protein accumulation.

[1285] Exemplary PCSK9-associated disorders or diseases include acquired or inherited disorders of lipid metabolism in a subject in need thereof. In some embodiments, PCSK9-associated disorders or diseases include any disorder associated with or caused by a disturbance in lipid metabolism, e.g., abnormal elevation of levels of any or all lipids and/or lipoproteins in the blood or a condition that can lead to abnormal elevation of levels of any or all lipids and/or lipoproteins in the blood, such as a hyperlipidemia, and other forms of lipid imbalance such as hypercholesterolemia, hypertriglyceridemia, mixed hyperlipidemia, as well as the pathological conditions associated with these disorders, e.g., congestive heart disease (CHD) and atherosclerosis.

[1286] In some embodiments, the method is for treating a lipid disorder. In some embodiments, the method is for treating hyperlipidemia. In some embodiments, the method is for treating hypercholesterolemia. In some embodiments, the method is for treating hypertriglyceridemia. In some embodiments, the method is for treating mixed hyperlipidemia. In some embodiments, the method is for treating congestive heart disease (CHD). In some embodiments, the method is for treating atherosclerosis. In some embodiments, the method is for treating dyslipidemia.

[1287] In some embodiments, the method is for preventing a lipid disorder. In some embodiments, the method is for preventing hyperlipidemia. In some embodiments, the method is for preventing hypercholesterolemia. In some embodiments, the method is for preventing hypertriglyceridemia. In some embodiments, the method is for preventing mixed hyperlipidemia. In some embodiments, the method is for preventing congestive heart disease (CHD). In some embodiments, the method is for preventing atherosclerosis. In some embodiments, the method is for preventing dyslipidemia.

[1288] In an aspect, the disclosure also provides a method of, or a use for lowering a level of low-density lipoprotein cholesterol (LDL-C) in a subject in need thereof. The method or the use includes administering to the subject the dsRNAi agent including the siRNA selected from Tables 1-2 and 5-6, or a pharmaceutical composition thereof. In some embodiments, the method includes administering to the subject a therapeutically effective amount of the dsRNAi agent including the siRNA selected from Tables 1-2 and 5-6, or a pharmaceutical composition thereof. In some embodiments, the level of low-density lipoprotein cholesterol (LDL-C) can be measured in a blood vessel of a subject in need thereof. The method includes administering to the subject the dsRNAi agent or a pharmaceutical composition as described herein. In some embodiments, the method includes administering to the subject a therapeutically effective amount of the dsRNAi agent or a pharmaceutical composition as described herein.

[1289] In an aspect, the disclosure provides a method of, or a use for treating or preventing hyperlipidemia in a subject in need thereof. The method or the use includes administering to the subject the dsRNAi agent including the siRNA selected from Tables 1-2 and 5-6, or a pharmaceutical composition thereof. In some embodiments, the method includes administering to the subject a therapeutically effective amount of the dsRNAi agent including the siRNA selected from Tables 1-2 and 5-6, or a pharmaceutical composition thereof. The method includes administering to the subject the dsRNAi agent or a pharmaceutical composition as described herein. In some embodiments, the method includes administering to the subject a therapeutically effective amount of the dsRNAi agent or a pharmaceutical composition as described herein.

[1290] In an aspect, the disclosure provides a method of, or a use for treating or preventing atherosclerotic cardiovascular disease (ASCVD) in a subject in need thereof. The method includes administering to the subject the dsRNAi agent or a pharmaceutical composition as described herein. In some embodiments, the method or the use includes administering to the subject the dsRNAi agent including the siRNA selected from Tables 1-2 and 5-6, or a pharmaceutical composition thereof. In some embodiments, the method includes administering to the subject a therapeutically effective amount of the dsRNAi agent including the siRNA selected from Tables 1-2 and 5-6, or a pharmaceutical composition thereof.

[1291] In an aspect, the disclosure provides a method of, or a use for reducing or preventing cardiovascular event in a subject in need thereof. The method includes administering to the subject the dsRNAi agent or a pharmaceutical composition as described herein. In some embodiments, the method or the use includes administering to the subject the dsRNAi agent including the siRNA selected from Tables 1-2 and 5-6, or a pharmaceutical composition thereof. In some embodiments, the method includes administering to the subject a therapeutically effective amount of the dsRNAi agent including the siRNA selected from Tables 1-2 and 5-6, or a pharmaceutical composition thereof. In some embodiments, the cardiovascular event is cardiovascular death, non-fatal myocardial infarction (MI), non-fatal ischemic stroke, urgent coronary revascularization, coronary heart disease (CHD) death, or any combination thereof.

[1292] In an aspect, the disclosure provides a method of, or a use for reducing or preventing a major limb adverse event (MALE) in a subject in need thereof. The method includes administering to the subject the dsRNAi agent or a pharmaceutical composition as described herein. In some embodiments, the method or the use includes administering to the subject the dsRNAi agent including the siRNA selected from Tables 1-2 and 5-6, or a pharmaceutical composition thereof. In some embodiments, the method includes administering to the subject a therapeutically effective amount of the dsRNAi agent including the siRNA selected from Tables 1-2 and 5-6, or a pharmaceutical composition thereof.

[1293] In some embodiments, the method or the use includes administering to the subject the dsRNAi agent including the siRNA selected from Tables 1-2 and 5-6, or a pharmaceutical composition thereof. In some embodiments, the method includes administering to the subject a therapeutically effective amount of the dsRNAi agent including the siRNA selected from Tables 1-2 and 5-6, or a pharmaceutical composition thereof.

[1294] In some embodiments, the MALE is acute lower limb ischemia, lower limb amputation due to ischemia, urgent lower limb revascularization for ischemia, or any combination thereof.

[1295] In certain aspects, for the methods described above, administration of the dsRNAi agent or the pharmaceutical composition may be, but not limited to, subcutaneous, intravenous, intramuscular, intraocular, intrabronchial, intrapleural, intraperitoneal, intraarterial, lymphatic, cerebrospinal, and any combinations thereof. In some embodiments, the dsRNAi agent or the pharmaceutical composition may be administered subcutaneously or intravenously.

[1296] In some embodiments, the dsRNAi agent is be delivered locally (e.g., to the site of the disease, such as a liver) so that levels of PCSK9 outside the diseased areas can be maintained as close to normal as possible. In some embodiments, the level of PCSK9 in the body can be modulated such that it is low enough to improve or ameliorate the disease state, but not so low that organ pathology occurs.

[1297] In some embodiments, the administration is via a depot injection that can release the dsRNAi agent in a consistent way over a prolonged time period, so as to reduce the frequency of dosing needed to obtain a desired effect, e.g., a desired inhibition of PCSK9, or a therapeutic or prophylactic effect and/or to provide more consistent serum concentrations of the therapeutic agent. In some embodiments, the administration is via a pump, e.g., external pump or a surgically implanted pump. For example, the pump is a subcutaneously implanted osmotic pump or an infusion pump for intravenous, subcutaneous, arterial, or epidural infusions. In some embodiments, the pump is a surgically implanted pump that delivers the dsRNAi agent described herein directly or closely to the liver.

[1298] In some embodiments, the subject is a human. In some embodiments, the subject has or diagnosed with hypercholesterolemia. In some embodiments, the subject has or diagnosed with PCSK9-associated disorder or disease.

[1299] In some embodiments, the subject after treatment (e.g., after administering the dsRNAi agent or the pharmaceutical composition described herein) does not have a muscle side effect. In some embodiments, the subject the after treatment (e.g., after administering the dsRNAi agent or the pharmaceutical composition described herein) does not have a skeletal muscle side effect (e.g., muscle AE).

[1300] In an aspect, the disclosure provides a method of, or a use for inhibiting expression of PCSK9 (e.g., gene or protein) in a subject in need thereof. In some embodiments, the method or the use includes administering to the subject the dsRNAi agent including (a) a sense strand comprising SEQ ID NO: 800, and an antisense strand comprising SEQ ID NO: 853; (b) a sense strand comprising SEQ ID NO: 801, and an antisense strand comprising SEQ ID NO: 854; (c) a sense strand comprising SEQ ID NO: 806, and an antisense strand comprising SEQ ID NO: 859; (d) a sense strand comprising SEQ ID NO: 811, and an antisense strand comprising SEQ ID NO: 864; (e) a sense strand comprising SEQ ID NO: 813, and an antisense strand comprising SEQ ID NO: 866; (f) a sense strand comprising SEQ ID NO: 830, and an antisense strand comprising SEQ ID NO: 883; or (g) a sense strand comprising SEQ ID NO: 1016, and an antisense strand comprising SEQ ID NO: 1022, or a pharmaceutical composition thereof. In some embodiments, the method includes administering to the subject a therapeutically effective amount of the dsRNAi agent including (a) a sense strand comprising SEQ ID NO: 800, and an antisense strand comprising SEQ ID NO: 853; (b) a sense strand comprising SEQ ID NO: 801, and an antisense strand comprising SEQ ID NO: 854; (c) a sense strand comprising SEQ ID NO: 806, and an antisense strand comprising SEQ ID NO: 859; (d) a sense strand comprising SEQ ID NO: 811, and an antisense strand comprising SEQ ID NO: 864; (e) a sense strand comprising SEQ ID NO: 813, and an antisense strand comprising SEQ ID NO: 866; (f) a sense strand comprising SEQ ID NO: 830, and an antisense strand comprising SEQ ID NO: 883, or (g) a sense strand comprising SEQ ID NO: 1016, and an antisense strand comprising SEQ ID NO: 1022; or a pharmaceutical composition thereof. In some embodiments, the dsRNAi agent includes a ligand. In some embodiments, the ligand may directly (e.g., covalently) conjugated to at least one strand of the dsRNA. In some embodiments, the ligand includes one or more GalNAc moieties. In some embodiments, the ligand includes a GalNAc ligand described herein.

[1301] In an aspect, the disclosure provides a method of, or for a use for treating or preventing the PCSK9-associated disorder or disease by reduction in PCSK9 expression in a subject in need thereof. The method or the use includes administering to the subject the dsRNAi agent including (a) a sense strand comprising SEQ ID NO: 800, and an antisense strand comprising SEQ ID NO: 853; (b) a sense strand comprising SEQ ID NO: 801, and an antisense strand comprising SEQ ID NO: 854; (c) a sense strand comprising SEQ ID NO: 806, and an antisense strand comprising SEQ ID NO: 859; (d) a sense strand comprising SEQ ID NO: 811, and an antisense strand comprising SEQ ID NO: 864; (e) a sense strand comprising SEQ ID NO: 813, and an antisense strand comprising SEQ ID NO: 866; (f) a sense strand comprising SEQ ID NO: 830, and an antisense strand comprising SEQ ID NO: 883, or (g) a sense strand comprising SEQ ID NO: 1016, and an antisense strand comprising SEQ ID NO: 1022; or a pharmaceutical composition thereof. The level of PCSK9 may be measured or detected in a sample (e.g., a blood, serum, or liver tissue) from the subject. In certain aspects, the method may include treating or preventing one or more symptoms in the subject having the PCSK9-associated disorder or disease. In some embodiments, the methods may decrease PCSK9 protein accumulation. In some embodiments, the dsRNAi agent includes a ligand. In some embodiments, the ligand may directly (e.g., covalently) conjugated to at least one strand of the dsRNA. In some embodiments, the ligand includes one or more GalNAc moieties. In some embodiments, the ligand includes a GalNAc ligand described herein.

[1302] In an aspect, the disclosure also provides a method of, or a use for lowering a level of low-density lipoprotein cholesterol (LDL-C) in a subject in need thereof. The method or the use includes administering to the subject the dsRNAi agent including (a) a sense strand comprising SEQ ID NO: 800, and an antisense strand comprising SEQ ID NO: 853; (b) a sense strand comprising SEQ ID NO: 801, and an antisense strand comprising SEQ ID NO: 854; (c) a sense strand comprising SEQ ID NO: 806, and an antisense strand comprising SEQ ID NO: 859; (d) a sense strand comprising SEQ ID NO: 811, and an antisense strand comprising SEQ ID NO: 864; (e) a sense strand comprising SEQ ID NO: 813, and an antisense strand comprising SEQ ID NO: 866; (f) a sense strand comprising SEQ ID NO: 830, and an antisense strand comprising SEQ ID NO: 883, or (g) a sense strand comprising SEQ ID NO: 1016, and an antisense strand comprising SEQ ID NO: 1022; or a pharmaceutical composition thereof. In some embodiments, the method includes administering to the subject a therapeutically effective amount of the dsRNAi agent including (a) a sense strand comprising SEQ ID NO: 800, and an antisense strand comprising SEQ ID NO: 853; (b) a sense strand comprising SEQ ID NO: 801, and an antisense strand comprising SEQ ID NO: 854; (c) a sense strand comprising SEQ ID NO: 806, and an antisense strand comprising SEQ ID NO: 859; (d) a sense strand comprising SEQ ID NO: 811, and an antisense strand comprising SEQ ID NO: 864; (e) a sense strand comprising SEQ ID NO: 813, and an antisense strand comprising SEQ ID NO: 866; (f) a sense strand comprising SEQ ID NO: 830, and an antisense strand comprising SEQ ID NO: 883, or (g) a sense strand comprising SEQ ID NO: 1016, and an antisense strand comprising SEQ ID NO: 1022; or a pharmaceutical composition thereof. In some embodiments, the level of low-density lipoprotein cholesterol (LDL-C) can be measured in a blood vessel of a subject in need thereof. The method includes administering to the subject the dsRNAi agent or a pharmaceutical composition as described herein. In some embodiments, the method includes administering to the subject a therapeutically effective amount of the dsRNAi agent or a pharmaceutical composition as described herein. In some embodiments, the dsRNAi agent includes a ligand. In some embodiments, the ligand may directly (e.g., covalently) conjugated to at least one strand of the dsRNA. In some embodiments, the ligand includes one or more GalNAc moieties. In some embodiments, the ligand includes a GalNAc ligand described herein.

[1303] In an aspect, the disclosure provides a method of, or a use for treating or preventing atherosclerotic cardiovascular disease (ASCVD) in a subject in need thereof. In some embodiments, the method or the use includes administering to the subject the dsRNAi agent including (a) a sense strand comprising SEQ ID NO: 800, and an antisense strand comprising SEQ ID NO: 853; (b) a sense strand comprising SEQ ID NO: 801, and an antisense strand comprising SEQ ID NO: 854; (c) a sense strand comprising SEQ ID NO: 806, and an antisense strand comprising SEQ ID NO: 859; (d) a sense strand comprising SEQ ID NO: 811, and an antisense strand comprising SEQ ID NO: 864; (e) a sense strand comprising SEQ ID NO: 813, and an antisense strand comprising SEQ ID NO: 866; or (f) a sense strand comprising SEQ ID NO: 830, and an antisense strand comprising SEQ ID NO: 883, or a pharmaceutical composition thereof. In some embodiments, the method includes administering to the subject a therapeutically effective amount of the dsRNAi agent including (a) a sense strand comprising SEQ ID NO: 800, and an antisense strand comprising SEQ ID NO: 853; (b) a sense strand comprising SEQ ID NO: 801, and an antisense strand comprising SEQ ID NO: 854; (c) a sense strand comprising SEQ ID NO: 806, and an antisense strand comprising SEQ ID NO: 859; (d) a sense strand comprising SEQ ID NO: 811, and an antisense strand comprising SEQ ID NO: 864; (e) a sense strand comprising SEQ ID NO: 813, and an antisense strand comprising SEQ ID NO: 866; (f) a sense strand comprising SEQ ID NO: 830, and an antisense strand comprising SEQ ID NO: 883, or (g) a sense strand comprising SEQ ID NO: 1016, and an antisense strand comprising SEQ ID NO: 1022; or a pharmaceutical composition thereof. In some embodiments, the dsRNAi agent includes a ligand. In some embodiments, the ligand may directly (e.g., covalently) conjugated to at least one strand of the dsRNA. In some embodiments, the ligand includes one or more GalNAc moieties. In some embodiments, the ligand includes a GalNAc ligand described herein.

[1304] In an aspect, the disclosure provides a method of, or a use for reducing or preventing cardiovascular event in a subject in need thereof. In some embodiments, the method or the use includes administering to the subject the dsRNAi agent including (a) a sense strand comprising SEQ ID NO: 800, and an antisense strand comprising SEQ ID NO: 853; (b) a sense strand comprising SEQ ID NO: 801, and an antisense strand comprising SEQ ID NO: 854; (c) a sense strand comprising SEQ ID NO: 806, and an antisense strand comprising SEQ ID NO: 859; (d) a sense strand comprising SEQ ID NO: 811, and an antisense strand comprising SEQ ID NO: 864; (e) a sense strand comprising SEQ ID NO: 813, and an antisense strand comprising SEQ ID NO: 866; (f) a sense strand comprising SEQ ID NO: 830, and an antisense strand comprising SEQ ID NO: 883, or (g) a sense strand comprising SEQ ID NO: 1016, and an antisense strand comprising SEQ ID NO: 1022; or a pharmaceutical composition thereof. In some embodiments, the method includes administering to the subject a therapeutically effective amount of the dsRNAi agent including (a) a sense strand comprising SEQ ID NO: 800, and an antisense strand comprising SEQ ID NO: 853; (b) a sense strand comprising SEQ ID NO: 801, and an antisense strand comprising SEQ ID NO: 854; (c) a sense strand comprising SEQ ID NO: 806, and an antisense strand comprising SEQ ID NO: 859; (d) a sense strand comprising SEQ ID NO: 811, and an antisense strand comprising SEQ ID NO: 864; (e) a sense strand comprising SEQ ID NO: 813, and an antisense strand comprising SEQ ID NO: 866; (f) a sense strand comprising SEQ ID NO: 830, and an antisense strand comprising SEQ ID NO: 883, or (g) a sense strand comprising SEQ ID NO: 1016, and an antisense strand comprising SEQ ID NO: 1022; or a pharmaceutical composition thereof. In some embodiments, the cardiovascular event is cardiovascular death, non-fatal myocardial infarction (MI), non-fatal ischemic stroke, urgent coronary revascularization, coronary heart disease (CHD) death, or any combination thereof. In some embodiments, the dsRNAi agent includes a ligand. In some embodiments, the ligand may directly (e.g., covalently) conjugated to at least one strand of the dsRNA. In some embodiments, the ligand includes one or more GalNAc moieties. In some embodiments, the ligand includes a GalNAc ligand described herein.

[1305] In an aspect, the disclosure provides a method of, or a use for reducing or preventing a major limb adverse event (MALE) in a subject in need thereof. In some embodiments, the method or the use includes administering to the subject the dsRNAi agent including (a) a sense strand comprising SEQ ID NO: 800, and an antisense strand comprising SEQ ID NO: 853; (b) a sense strand comprising SEQ ID NO: 801, and an antisense strand comprising SEQ ID NO: 854; (c) a sense strand comprising SEQ ID NO: 806, and an antisense strand comprising SEQ ID NO: 859; (d) a sense strand comprising SEQ ID NO: 811, and an antisense strand comprising SEQ ID NO: 864; (e) a sense strand comprising SEQ ID NO: 813, and an antisense strand comprising SEQ ID NO: 866; (f) a sense strand comprising SEQ ID NO: 830, and an antisense strand comprising SEQ ID NO: 883, or (g) a sense strand comprising SEQ ID NO: 1016, and an antisense strand comprising SEQ ID NO: 1022; or a pharmaceutical composition thereof. In some embodiments, the method includes administering to the subject a therapeutically effective amount of the dsRNAi agent including (a) a sense strand comprising SEQ ID NO: 800, and an antisense strand comprising SEQ ID NO: 853; (b) a sense strand comprising SEQ ID NO: 801, and an antisense strand comprising SEQ ID NO: 854; (c) a sense strand comprising SEQ ID NO: 806, and an antisense strand comprising SEQ ID NO: 859; (d) a sense strand comprising SEQ ID NO: 811, and an antisense strand comprising SEQ ID NO: 864; (e) a sense strand comprising SEQ ID NO: 813, and an antisense strand comprising SEQ ID NO: 866; (f) a sense strand comprising SEQ ID NO: 830, and an antisense strand comprising SEQ ID NO: 883, or (g) a sense strand comprising SEQ ID NO: 1016, and an antisense strand comprising SEQ ID NO: 1022; or a pharmaceutical composition thereof. In some embodiments, the dsRNAi agent includes a ligand. In some embodiments, the ligand may directly (e.g., covalently) conjugated to at least one strand of the dsRNA. In some embodiments, the ligand includes one or more GalNAc moieties. In some embodiments, the ligand includes a GalNAc ligand described herein.

[1306] In some embodiments, the dsRNAi including (a) a sense strand comprising SEQ ID NO: 800, and an antisense strand comprising SEQ ID NO: 853; (b) a sense strand comprising SEQ ID NO: 801, and an antisense strand comprising SEQ ID NO: 854; (c) a sense strand comprising SEQ ID NO: 806, and an antisense strand comprising SEQ ID NO: 859; (d) a sense strand comprising SEQ ID NO: 811, and an antisense strand comprising SEQ ID NO: 864; (e) a sense strand comprising SEQ ID NO: 813, and an antisense strand comprising SEQ ID NO: 866; (f) a sense strand comprising SEQ ID NO: 830, and an antisense strand comprising SEQ ID NO: 883 or (g) a sense strand comprising SEQ ID NO: 1016, and an antisense strand comprising SEQ ID NO: 1022 may be conjugated to one or more ligands (e.g., L96 or X2000) as described herein.

[1307] All methods described herein can be performed in any suitable order unless otherwise indicated herein or otherwise clearly contradicted by context. The use of any and all examples, or exemplary language (e.g. “such as”) provided herein is intended merely to better illuminate the invention and does not pose a limitation on the scope of the invention otherwise claimed.

### Kit

[1308] In an aspect, provided is a kit including the dsRNAi agent or the pharmaceutical composition as described herein. In certain aspects, the kit further includes one or more applicator.

[1309] In certain aspects, the kit may include a suitable container containing a pharmaceutical composition (e.g., PCSK9 dsRNAi agent) as described herein. In some embodiments, the container may be a vial or a pre-filled syringe. In certain aspects, the kit may include a suitable applicator (e.g., an injection device) for parenterally (e.g., subcutaneously or intravenously) administering the pharmaceutical composition (e.g., PCSK9 dsRNAi agent) as described herein. In some embodiments, the kit includes a syringe as an applicator and optionally include a needle (e.g., with or without cannula). In some embodiments, the kit includes a pre-filled syringe containing the pharmaceutical composition (e.g., PCSK9 dsRNAi agent), optionally with a needle (e.g., with or without cannula).

### EMBODIMENTS

[1310] Embodiment 1: A double stranded RNAi (dsRNAi) agent comprising:
[1311] (i) a sense strand comprising a nucleotide sequence selected from SEQ ID Nos. 3 to 381; and
[1312] (ii) an antisense strand forming a duplex with the sense strand and comprising a nucleotide sequence selected from SEQ ID Nos. 382 to 760.

[1313] Embodiment 2: A double stranded RNAi (dsRNAi) agent comprising:
[1314] (i) a sense strand comprising a nucleotide sequence selected from SEQ ID Nos. 761 to 776; and
[1315] (ii) an antisense strand forming a duplex with the sense strand and comprising a nucleotide sequence selected from SEQ ID Nos. 777 to 792.

[1316] Embodiment 3: The dsRNAi agent of Embodiment 1 or 2, wherein one or more nucleotides in the sense strand and the antisense strand are modified nucleotides

[1317] Embodiment 4: The dsRNAi agent of any one of Embodiments 1 to 3, wherein each of the modified nucleotides independently comprises one or more modifications selected from a 2′-deoxy modification, a 2′-O-alkyl modification, a 2′-halo modification, a threofuranosyl nucleotide (TNA) modification, a 2′-5′-linkage modification, a conformationally restricting modification, an abasic modification, a 2′-amino-modification, a 2′-O-allyl modification, 2′-C-alkyl modification, a 2′-O-alkoxyalkyl modification, a morpholino modification, a phosphoramidate modification, a non-natural nucleobase modification, a modification in a tetrahydropyran, a modification containing a 1,5-anhydrohexitol, a modification containing a cyclohexenyl, a modification containing a phosphorothioate group, a modification containing a 5′-vinyl-phosphonate, a modification containing a 5′-phosphate, a modification to form a thermally destabilizing nucleotide, a glycol nucleic acid (GNA) modification, and a 2-O—(N-methylacetamide) modification.

[1318] Embodiment 5: The dsRNAi agent of Embodiment 4, wherein each of the modified nucleotides independently comprises one or more modifications selected from 2′-deoxy modification, 2′-O-alkoxyalkyl modification, 2′-O-alkyl modification, 2′-O-allyl modification, 2′-C-allyl modification, 2′-halo modification, modification containing a non-natural nucleobase, GNA modification, and TNA modification.

[1319] Embodiment 6: The dsRNAi agent of any one of Embodiments 1 to 5, wherein the dsRNAi agent comprises a 3′-phosphorothioate (PS) modification.

[1320] Embodiment 7: The dsRNAi agent of any one of Embodiments 3 to 6, wherein each of the modified nucleotides independently comprises one or more modifications selected from 2′-deoxy modification, 2′-O-methyl (2′-OMe) modification, 2′-fluoro (2′-F) modification, 2′-O-methoxyethyl (2′-MOE) modification, the modification containing a non-natural nucleobase, TNA, GNA, 3′-phosphorothioate (PS) modification, and 5′-vinyl-phosphonate (5′-VP) modification.

[1321] Embodiment 8: The dsRNAi agent of any one of Embodiments 1 to 7, wherein the sense strand comprises one or two 2′-MOE modifications positioned at the 1st and/or 2nd nucleotides from the 5′ end.

[1322] Embodiment 9: The dsRNAi agent of any one of Embodiments 1 to 8, wherein the sense strand comprises one or two 2′-MOE modifications positioned at the 1st and/or 2nd nucleotides from the 3′ end.

[1323] Embodiment 10: The dsRNAi agent of any one of Embodiments 1 to 7, wherein the sense strand comprises one or two TNAs positioned at the 1st and/or 2nd nucleotides from the 5′ end.

[1324] Embodiment 11: The dsRNAi agent of any one of Embodiments 1 to 7 and 10, wherein the sense strand comprises one or two TNAs positioned at the 1st and/or 2nd nucleotides from the 3′ end.

[1325] Embodiment 12: The dsRNAi agent of any one of Embodiments 1 to 11, wherein the antisense strand comprises a 5′-VP modification at the 1st nucleotide from the 5′ end.

[1326] Embodiment 13: The dsRNAi agent of any one of Embodiments 1 to 12, wherein the antisense strand comprises a 5′-VP-2′-OMe modification at the 1st position from the 5′ end.

[1327] Embodiment 14: The dsRNAi agent of any one of Embodiments 1 to 13, wherein each of the sense strand and the antisense strand independently comprises two, three, four, five or six 2′-F modified nucleotides.

[1328] Embodiment 15: The dsRNAi agent of any one of Embodiments 1 to 14, wherein the sense strand comprises one or two 3′-PS modifications at the 1st and/or 2nd nucleotides from the 5′ end.

[1329] Embodiment 16: The dsRNAi agent of any one of Embodiments 1 to 15, wherein the sense strand comprises one or two 3′-PS modifications at the 1st and/or 2nd nucleotides from the 3′ end.

[1330] Embodiment 17: The dsRNAi agent of any one of Embodiments 1 to 16, wherein the antisense strand comprises one or two 3′-PS modifications at the 1st and/or 2nd nucleotides from the 5′ end, and/or one or two 3′-PS modifications at the 1st and/or 2nd nucleotides from the 3′ end.

[1331] Embodiment 18: The dsRNAi agent of any one of Embodiments 1 to 17, wherein the sense strand is 21 nucleotides in length and the antisense strand is 23 nucleotides in length.

[1332] Embodiment 19: The dsRNAi agent of Embodiment 18, wherein the sense strand comprises one to four 2′-MOE modifications positioned at the 1st, 2nd, 20th, and/or 21st nucleotides from the 5′ end.

[1333] Embodiment 20: The dsRNAi agent of any one of Embodiments 18 to 19, wherein the sense strand does not comprise a 2′-MOE modification at the 3rd to 19th positions from the 5′ end.

[1334] Embodiment 21: The dsRNAi agent of Embodiment 18, wherein the sense strand comprises one to four TNAs positioned at the 1st, 2nd, 20th, and/or 21st nucleotides from the 5′ end.

[1335] Embodiment 22: The dsRNAi agent of any one of Embodiments 18 and 21, wherein the sense strand does not comprise a 2′-MOE modifications and TNA at the 3rd to 19th positions from the 5′ end.

[1336] Embodiment 23: The dsRNAi agent of any one of Embodiments 18 to 22, wherein the sense strand comprises two, three, or four 2′-F modifications positioned at the 7th, 9th, 10th, and/or 11th nucleotides from the 5′ end.

[1337] Embodiment 24: The dsRNAi agent of any one of Embodiments 18 to 23, wherein the sense strand comprises one or two 2′-deoxy modifications positioned at the 10th and/or 11th nucleotides from the 5′ end.

[1338] Embodiment 25: The dsRNAi agent of any one of Embodiments 18 to 24, wherein the sense strand comprises (i) 2′-F modifications positioned at the 7th, 9th, and 10th nucleotides from the 5′ end and (ii) a 2′-deoxy modification positioned at the 11th nucleotide from the 5′ end.

[1339] Embodiment 26: The dsRNAi agent of any one of Embodiments 19 to 25, wherein the remaining nucleotides in the sense strand comprise 2′-OMe modifications.

[1340] Embodiment 27: The dsRNAi agent of any one of Embodiments 18 to 26, wherein the antisense strand comprises a 5′-(E)-VP modification at the 1st nucleotide from the 5′ end.

[1341] Embodiment 28: The dsRNAi agent of any one of Embodiments 18 to 26, wherein the antisense strand comprises a 5′-(E)-VP-2′-OMe modification at the 1st nucleotide from the 5′ end.

[1342] Embodiment 29: The dsRNAi agent of any one of Embodiments 18 to 28, wherein the antisense strand comprises two, three, or four 2′-F modifications positioned at the 2nd, 6th, 14th, and/or 16th nucleotides from the 5′ end.

[1343] Embodiment 30: The dsRNAi agent of any one of Embodiments 18 to 29, wherein the antisense strand comprises 2′-F modifications positioned at the 2nd, 6th, 14th, and 16th nucleotides from the 5′ end.

[1344] Embodiment 31: The dsRNAi agent of any one of Embodiments 18 to 29, wherein the antisense strand comprises 2′-F modifications positioned at the 2nd, 6th, 14th, and 16th nucleotides from the 5′ end and a TNA positioned at the 3rd nucleotide from the 5′ end.

[1345] Embodiment 32: The dsRNAi agent of any one of Embodiments 18 to 29, wherein the antisense strand comprises 2′-F modifications positioned at the 2nd, 6th, 14th, and 16th nucleotides from the 5′ end and a TNA, GNA or 2′-deoxy modification positioned at the 5th nucleotide from the 5′ end.

[1346] Embodiment 33: The dsRNAi agent of any one of Embodiments 18 to 29, wherein the antisense strand comprises 2′-F modifications positioned at the 2nd, 14th, and 16th nucleotides from the 5′ end and a TNA, GNA or 2′-deoxy modification positioned at the 6th nucleotide from the 5′ end.

[1347] Embodiment 34: The dsRNAi agent of any one of Embodiments 18 to 29, wherein the antisense strand comprises 2′-F modifications positioned at the 2nd, 6th, 14th, and 16th nucleotides and a TNA, GNA or 2′-deoxy modification positioned at the 7th nucleotide.

[1348] Embodiment 35: The dsRNAi agent of any one of Embodiments 27 to 34, wherein the remaining nucleotides in antisense strand comprise 2′-OMe modified modifications.

[1349] Embodiment 36: The dsRNAi agent of any one of Embodiments 18 to 35, wherein the sense strand comprises one to eight 3′-PS group at the 1st, 2nd, 3rd, 4th, 17th, 18th, 19th and/or 20th nucleotides from the 5′ end.

[1350] Embodiment 37: The dsRNAi agent of any one of Embodiments 18 to 36, wherein the antisense strand comprises one to eight 3′-PS group at the 1st, 2nd, 3rd, 4th, 19th, 20th, 21st and/or 22nd nucleotides from the 5′ end.

[1351] Embodiment 38: The dsRNAi agent of any one of Embodiments 15, 16, 17, 36 and 37, wherein at least one of the 3′-PS groups in each sense strand and antisense strand has a stereopure Rp configuration.

[1352] Embodiment 39: The dsRNAi agent of any one of Embodiments 15, 16, 17, 36 and 37, wherein at least one of the 3′-PS groups in each sense strand and antisense strand has a stereopure Sp configuration.

[1353] Embodiment 40: A double stranded RNAi (dsRNAi) agent comprising:
[1354] (a) a sense strand comprising SEQ ID NO: 800, and
   [1355] an antisense strand comprising SEQ ID NO: 853;
[1356] (b) a sense strand comprising SEQ ID NO: 801, and
   [1357] an antisense strand comprising SEQ ID NO: 854;
[1358] (c) a sense strand comprising SEQ ID NO: 806, and
   [1359] an antisense strand comprising SEQ ID NO: 859;
[1360] (d) a sense strand comprising SEQ ID NO: 811, and
   [1361] an antisense strand comprising SEQ ID NO: 864;
[1362] (e) a sense strand comprising SEQ ID NO: 813, and
   [1363] an antisense strand comprising SEQ ID NO: 866;
[1364] or
[1365] (f) a sense strand comprising SEQ ID NO: 830, and
   [1366] an antisense strand comprising SEQ ID NO: 883

[1367] Embodiment 41: The dsRNAi agent of any one of Embodiments 1 through 40, further comprising a ligand.

[1368] Embodiment 42: The dsRNAi agent of Embodiment 1, wherein the ligand comprises a N-acetylgalactosamine (GalNAc) moiety.

[1369] Embodiment 43: The dsRNAi agent of Embodiment 1 or 42, wherein the ligand has a structure of:

[chemical structure]

[1370] wherein:
[1371] each L¹ is independently a linker which may be same or different in each occurrence;
[1372] L² is a linker;
[1373] n is an integer from 1 to 3; and
[1374] [symbol] is an attachment point to the sense strand or the antisense strand, or to a conjugate linker conjugated to the sense strand or the antisense strand.

[1375] Embodiment 44: The dsRNAi agent of Embodiment 43, wherein the ligand comprises the following structure of

[chemical structure]

[1376] wherein:
[1377] each p1, p2, p3, q1, q2, r1, r2 and r3 is independently an integer from 0 to 12;
[1378] each n1, n2, and n3 is independently an integer from 1 to 3; and
[1379] “*” is an attachment point to L².

[1380] Embodiment 45: The dsRNAi agent of Embodiment 42, wherein the ligand has a structure of:

[chemical structure]

[1381] wherein:
[1382] each L¹¹, L¹², L¹³, L¹⁴, and L¹⁵ is an independently a linker;
[1383] L² is a linker;
[1384] [symbol] is an attachment point to the sense strand or the antisense strand, or to a conjugate linker conjugated to the sense strand or the antisense strand.

[1385] Embodiment 46: The dsRNAi agent of Embodiment 45, wherein the ligand has a structure of:

[chemical structure]

[1386] wherein:
[1387] each p11 and q11 is independently an integer from 0 to 12;
[1388] each z1, z2, and z3 is independently an integer of 0 to 12; and
[1389] [symbol] is an attachment point to the sense strand or the antisense strand, or to a conjugate linker conjugated to the sense strand or the antisense strand

[1390] Embodiment 47: The dsRNAi agent of any one of Embodiments 1 to 46, wherein the ligand comprises the following structure:

[chemical structure]

[1391] wherein:
[1392] [symbol] is an attachment point to the sense strand or the antisense strand or to a conjugate linker conjugated to the sense strand or the antisense strand.

[1393] Embodiment 48: The dsRNAi agent of Embodiment 47, wherein the ligand is conjugated to 3′ end of the sense strand to form the following structure:

[chemical structure]

wherein W is —OH or —SH.

[1394] Embodiment 49: The dsRNAi agent of Embodiment 47, wherein the ligand is conjugated to 5′ end of the sense strand to form the following structure:

[chemical structure]

or a pharmaceutically acceptable salt thereof, wherein W is —OH or —SH.

[1395] Embodiment 50: The dsRNAi agent of Embodiment 48 or 49, wherein W is —OH.

[1396] Embodiment 51: A double stranded RNAi (dsRNAi) agent comprising:
[1397] (a) a sense strand consisting of SEQ ID NO: 906, and
   [1398] an antisense strand consisting of SEQ ID NO: 963;
[1399] (b) a sense strand consisting of SEQ ID NO: 907, and
   [1400] an antisense strand consisting of SEQ ID NO: 964;
[1401] (c) a sense strand consisting of SEQ ID NO: 947, and
   [1402] an antisense strand consisting of SEQ ID NO: 1004;
[1403] (d) a sense strand consisting of SEQ ID NO: 948, and
   [1404] an antisense strand consisting of SEQ ID NO: 1005;
[1405] (e) a sense strand consisting of SEQ ID NO: 949, and
   [1406] an antisense strand consisting of SEQ ID NO: 1006;
[1407] or
[1408] (f) a sense strand consisting of SEQ ID NO: 950, and
   [1409] an antisense strand consisting of SEQ ID NO: 1007;
[1410] wherein the ligand (L96) is conjugated to the 3′ end of the sense strand to form the following schematic:

[chemical structure]

[1411] or a pharmaceutically acceptable salt thereof, wherein W is —OH.

[1412] Embodiment 52: The dsRNAi agent of any one of Embodiments 40 to 51, wherein the dsRNAi agent is in a pharmaceutically acceptable salt form.

[1413] Embodiment 53: The dsRNAi agent of Embodiment 52, wherein the pharmaceutically acceptable salt is a sodium salt.

[1414] Embodiment 54: A pharmaceutical composition comprising the dsRNAi agent of any one of Embodiments 1 to 53 or a pharmaceutically acceptable salt thereof, and a pharmaceutically acceptable carrier.

[1415] Embodiment 55: The pharmaceutical composition of Embodiment 54, wherein the composition is in an aqueous solution form.

[1416] Embodiment 56: A method of inhibiting PCSK9 expression in a cell, the method comprising:
[1417] (a) contacting the cell with the dsRNAi agent of any one of Embodiments 1 to 53 or a pharmaceutically acceptable salt thereof, or the pharmaceutical composition of any one of Embodiments 54 to 55; and
[1418] (b) maintaining the cell produced in step (a) for a time sufficient to obtain degradation of the mRNA transcript of a PCSK9 gene, thereby inhibiting expression of the PCSK9 gene in the cell.

[1419] Embodiment 57: A method of lowering a level of low-density lipoprotein cholesterol (LDL-C) in a subject in need thereof, comprising administering to the subject the dsRNAi agent of any one of Embodiments 1 to 53 or a pharmaceutically acceptable salt thereof, or the pharmaceutical composition of any one of Embodiments 54 to 55.

[1420] Embodiment 58: A method of treating lipidemia mediated by PCSK9 expression in a subject in need thereof, comprising administering to the subject the dsRNAi agent of any one of Embodiments 1 to 53 or a pharmaceutically acceptable salt thereof, or the pharmaceutical composition of any one of Embodiments 54 to 55.

[1421] Embodiment 59: A method of treating or preventing atherosclerotic cardiovascular disease (ASCVD) in a subject in need thereof, comprising administering to the subject the dsRNAi agent of any one of Embodiments 1 to 53 or a pharmaceutically acceptable salt thereof, or the pharmaceutical composition of any one of Embodiments 54 to 55.

[1422] Embodiment 60: A method of reducing or preventing cardiovascular event in a subject in need thereof, comprising administering to the subject the dsRNAi agent of any one of Embodiments 1 to 53 or a pharmaceutically acceptable salt thereof, or the pharmaceutical composition of any one of Embodiments 54 to 55.

[1423] Embodiment 61: The method of Embodiment 60, wherein the cardiovascular event is cardiovascular death, non-fatal myocardial infarction (MI), non-fatal ischemic stroke, urgent coronary revascularization, coronary heart disease (CHD) death, or any combination thereof.

[1424] Embodiment 62: A method of reducing or preventing a major limb adverse event (MALE) in a subject in need thereof, comprising administering to the subject the dsRNAi agent of any one of Embodiments 1 to 53 or a pharmaceutically acceptable salt thereof, or the pharmaceutical composition of any one of Embodiments 54 to 55.

[1425] Embodiment 63: The method of Embodiment 62, wherein the MALE is acute lower limb ischemia, lower limb amputation due to ischemia, urgent lower limb revascularization for ischemia, or any combination thereof.

[1426] Embodiment 64: A method of inhibiting PCSK9 expression in a cell, the method comprising:
[1427] (i) contacting the cell with a dsRNAi agent, wherein the dsRNAi agent comprises:
   [1428] (a) a sense strand comprising SEQ ID NO: 800, and
      [1429] an antisense strand comprising SEQ ID NO: 853;
   [1430] (b) a sense strand comprising SEQ ID NO: 801, and
      [1431] an antisense strand comprising SEQ ID NO: 854;
   [1432] (c) a sense strand comprising SEQ ID NO: 806, and
      [1433] an antisense strand comprising SEQ ID NO: 859;
   [1434] (d) a sense strand comprising SEQ ID NO: 811, and
      [1435] an antisense strand comprising SEQ ID NO: 864;
   [1436] (e) a sense strand comprising SEQ ID NO: 813, and
      [1437] an antisense strand comprising SEQ ID NO: 866;
   [1438] or
   [1439] (f) a sense strand comprising SEQ ID NO: 830, and
      [1440] an antisense strand comprising SEQ ID NO: 883,
[1441] (ii) maintaining the cell produced in step (a) for a time sufficient to obtain degradation of the mRNA transcript of a PCSK9 gene, thereby inhibiting expression of the PCSK9 gene in the cell.

[1442] Embodiment 65: A method of lowering a level of low-density lipoprotein cholesterol (LDL-C) in a subject in need thereof, comprising administering to the subject a dsRNAi agent, wherein the dsRNAi agent comprises:
[1443] (a) a sense strand comprising SEQ ID NO: 800, and
   [1444] an antisense strand comprising SEQ ID NO: 853;
[1445] (b) a sense strand comprising SEQ ID NO: 801, and
   [1446] an antisense strand comprising SEQ ID NO: 854;
[1447] (c) a sense strand comprising SEQ ID NO: 806, and
   [1448] an antisense strand comprising SEQ ID NO: 859;
[1449] (d) a sense strand comprising SEQ ID NO: 811, and
   [1450] an antisense strand comprising SEQ ID NO: 864;
[1451] (e) a sense strand comprising SEQ ID NO: 813, and
   [1452] an antisense strand comprising SEQ ID NO: 866;
[1453] or
[1454] (f) a sense strand comprising SEQ ID NO: 830, and
   [1455] an antisense strand comprising SEQ ID NO: 883.

[1456] Embodiment 66: A method of treating lipidemia mediated by PCSK9 expression in a subject in need thereof, comprising administering to the subject a dsRNAi agent, wherein the dsRNAi agent comprises:
[1457] (a) a sense strand comprising SEQ ID NO: 800, and
   [1458] an antisense strand comprising SEQ ID NO: 853;
[1459] (b) a sense strand comprising SEQ ID NO: 801, and
   [1460] an antisense strand comprising SEQ ID NO: 854;
[1461] (c) a sense strand comprising SEQ ID NO: 806, and
   [1462] an antisense strand comprising SEQ ID NO: 859;
[1463] (d) a sense strand comprising SEQ ID NO: 811, and
   [1464] an antisense strand comprising SEQ ID NO: 864;
[1465] (e) a sense strand comprising SEQ ID NO: 813, and
   [1466] an antisense strand comprising SEQ ID NO: 866;
[1467] or
[1468] (f) a sense strand comprising SEQ ID NO: 830, and
   [1469] an antisense strand comprising SEQ ID NO: 883.

[1470] Embodiment 67: A method of treating or preventing atherosclerotic cardiovascular disease (ASCVD) in a subject in need thereof, comprising administering to the subject a dsRNAi agent, wherein the dsRNAi agent comprises:
[1471] (a) a sense strand comprising SEQ ID NO: 800, and
   [1472] an antisense strand comprising SEQ ID NO: 853;
[1473] (b) a sense strand comprising SEQ ID NO: 801, and
   [1474] an antisense strand comprising SEQ ID NO: 854;
[1475] (c) a sense strand comprising SEQ ID NO: 806, and
   [1476] an antisense strand comprising SEQ ID NO: 859;
[1477] (d) a sense strand comprising SEQ ID NO: 811, and
   [1478] an antisense strand comprising SEQ ID NO: 864;
[1479] (e) a sense strand comprising SEQ ID NO: 813, and
   [1480] an antisense strand comprising SEQ ID NO: 866;
[1481] or
[1482] (f) a sense strand comprising SEQ ID NO: 830, and
   [1483] an antisense strand comprising SEQ ID NO: 883.

[1484] Embodiment 68: A method of reducing or preventing cardiovascular event in a subject in need thereof, comprising administering to the subject a dsRNAi agent, wherein the dsRNAi agent comprises:
[1485] (a) a sense strand comprising SEQ ID NO: 800, and
   [1486] an antisense strand comprising SEQ ID NO: 853;
[1487] (b) a sense strand comprising SEQ ID NO: 801, and
   [1488] an antisense strand comprising SEQ ID NO: 854;
[1489] (c) a sense strand comprising SEQ ID NO: 806, and
   [1490] an antisense strand comprising SEQ ID NO: 859;
[1491] (d) a sense strand comprising SEQ ID NO: 811, and
   [1492] an antisense strand comprising SEQ ID NO: 864;
[1493] (e) a sense strand comprising SEQ ID NO: 813, and
   [1494] an antisense strand comprising SEQ ID NO: 866;
[1495] or
[1496] (f) a sense strand comprising SEQ ID NO: 830, and
   [1497] an antisense strand comprising SEQ ID NO: 883.

[1498] Embodiment 69: The method of Embodiment 68, wherein the cardiovascular event is cardiovascular death, non-fatal myocardial infarction (MI), non-fatal ischemic stroke, urgent coronary revascularization, coronary heart disease (CHD) death, or any combination thereof.

[1499] Embodiment 70: A method of reducing or preventing a major limb adverse event (MALE) in a subject in need thereof, comprising administering to the subject a dsRNAi agent, wherein the dsRNAi agent comprises:
[1500] (a) a sense strand comprising SEQ ID NO: 800, and
   [1501] an antisense strand comprising SEQ ID NO: 853;
[1502] (b) a sense strand comprising SEQ ID NO: 801, and
   [1503] an antisense strand comprising SEQ ID NO: 854;
[1504] (c) a sense strand comprising SEQ ID NO: 806, and
   [1505] an antisense strand comprising SEQ ID NO: 859;
[1506] (d) a sense strand comprising SEQ ID NO: 811, and
   [1507] an antisense strand comprising SEQ ID NO: 864;
[1508] (e) a sense strand comprising SEQ ID NO: 813, and
   [1509] an antisense strand comprising SEQ ID NO: 866;
[1510] or
[1511] (f) a sense strand comprising SEQ ID NO: 830, and
   [1512] an antisense strand comprising SEQ ID NO: 883.

[1513] Embodiment 71: The method of Embodiment 70, wherein the MALE is acute lower limb ischemia, lower limb amputation due to ischemia, urgent lower limb revascularization for ischemia, or any combination thereof.

[1514] Embodiment 72: The method of any one of Embodiments 64 to 71, wherein the dsRNAi agent further comprises a ligand comprising the following structure:

[chemical structure]

[1515] wherein
[1516] [symbol] is an attachment point to the sense strand or the antisense strand or to a conjugate linker conjugated to the sense strand or the antisense strand.

[1517] Embodiment 73: The method of any one of Embodiments 57 to 72, wherein the subject is a human.

[1518] Embodiment 74: The method of any one of Embodiments 57 to 72, wherein the subject has or is diagnosed with hyperlipidemia, hypercholesterolemia, hypertriglyceridemia, mixed hyperlipidemia, congestive heart disease (CHD) or atherosclerosis.

[1519] Embodiment 75: The method of any one of Embodiments 57 to 74, wherein the dsRNAi agent or the pharmaceutical composition is administered to the subject subcutaneously or intravenously.

[1520] Embodiment 76: A kit comprising the dsRNAi agent of any one of Embodiments 1 to 53 or a pharmaceutically acceptable salt thereof, or the pharmaceutical composition of any one of Embodiments 54 to 55.

[1521] Embodiment 77: The kit of Embodiment 76, further comprising an applicator.

[1522] Embodiment 78: The kit of Embodiment 77, wherein the applicator is a syringe.

[1523] Embodiment 79: The kit of Embodiment 78, wherein the applicator is a pre-filled syringe.

### EXAMPLES

### Example 1. Preparation of siRNAs

[1524] Small scale synthesis was used to prepare PCSK9 siRNAs; medium and large scale syntheses can also be used to prepare these siRNAs in larger quantities.

### Small Scale Synthesis and Purification Methods for the Initial Screens (1 μMole Scale)

[1525] Small scale synthesis was used to generate siRNAs. PCSK9 sequences (e.g., Tables 1-2) were synthesized on MerMade 192 synthesizer (BioAutomation, Plano, Tex.) at 1 □mol scale.

[1526] All oligonucleotides were prepared at 1 □mole scale using a MerMade 192 high-throughput synthesizer and commercially available phosphoramidite monomers, following standard protocols for solid-phase synthesis and deprotection. The GalNAc ligand was introduced at the 3′ end of the sense strand of the siRNA using a functionalized solid support, as previously described. PS linkages were prepared by oxidation of phosphite utilizing 0.1 M 3-((N,N-dimethyl-aminomethylidene)amino)-3H-1, 2, 4-dithiazole-5-thione (DDTT) in pyridine. After cleavage, deprotection, and precipitation of the products, each crude solution was desalted via size exclusion using water to elute the final oligonucleotide products. The identities and purities of all oligonucleotides were confirmed using electrospray ionization mass spectrometry (ESI-MS) and ion exchange-high-performance liquid chromatography (IEX-HPLC), respectively, and equimolar amounts of the complementary strands were annealed to provide the desired siRNA duplex. All duplexes met a purity cutoff of at least 85%.

### Synthesis, Cleavage and Deprotection:

[1527] The synthesis of PCSK9 sequences can use solid supported oligonucleotide synthesis using phosphoramidite chemistry.

[1528] The synthesis of the above sequences was performed at 1 QM scale in 96 well plates. The RNA, DNA, 2′-OMe, TNA, GNA, 5′-(E)-VP-2′-OMe, 2′-MOE, and 2′-F phosphoramidite solutions were prepared at 0.1 M concentration and 5-(ethylthio)tetrazole (0.25 M Acetonitrile) was used as activator. Deblocking solution, oxidizer solution and capping solution were prepared according to standard processes.

[1529] The synthesized sequences were cleaved and deprotected in 96 well plates, using methylamine solution (a 3:1 mixture of aqueous and ethanolic solutions) in the first step and fluoride reagent in the second step. The crude sequences were precipitated using acetone:ethanol (80:20) mix and the pellet were re-suspended in 0.02M sodium acetate buffer. Samples from each sequence were analyzed by LC-MS to confirm the identity, UV for quantification and a selected set of samples by IEX chromatography to determine purity.

### Purification and Desalting

[1530] PCSK9 tiled sequences were purified on AKTA explorer purification system using Source 15Q column. A column temperature of 65° C. was maintained during purification. Sample injection and collection were performed in 96 well (1.8 mL-deep well) plates. A single peak corresponding to the full length sequence was collected in the eluent. The purified sequences were desalted on a Sephadex G25 column using AKTA purifier. The concentration of desalted PCSK9 sequences were calculated using absorbance at 260 nm wavelength and purity was measured by ion exchange chromatography.

### Annealing

[1531] Purified desalted sense and antisense single strands were mixed in equimolar amounts and annealed to form PCSK9 duplexes. The duplexes were prepared at 10 uM concentration in 1×PBS buffer and tested by capillary gel electrophoresis for purity.

### Medium Scale Synthesis and Purification (1-50 μMol)

[1532] Medium scale synthesis can also be used to generate siRNAs. Single-stranded RNAs in scales between 1 and 50 μmol were prepared by solid phase synthesis using an MerMade 12 synthesizer (BioAutomation, Plano, Tex.). Universal Support was purchased from AM Chemicals LLC (VisTa, CA) and 3′-GalNAc controlled pore glass (CPG) support (500 Å, loading 50-100 μmol/g) were homemade. For larger scales, empty synthesis columns (10 μmol) from Glen Research Corp. and large amidite (250 mL) and reagent bottles (2000 mL) were used. RNA and RNA containing 2′-MOE, 2′-F or 2′-O-methyl nucleotides were generated by solid phase synthesis employing the corresponding phosphoramidites (Hongene Biotech Corporation, Union City, CA). These building blocks were incorporated at selected sites within the sequence of the oligoribonucleotide chain using standard nucleoside phosphoramidite chemistry such as described in Current Protocols in Nucleic Acid Chemistry, Beaucage, S. L. et al. (Edrs.), John Wiley & Sons, Inc., New York, NY, USA. Vinylphosphonates at the 5′ end of the antisense strand were introduced by using solid-phase synthesis of 5′(E)-vinylphosphonate-2′-OMe-U phosphoramidite monomers. Phosphorothioate linkages were introduced using a solution of the 0.1 M DDTT (AM Chemicals, Oceanside, CA) in pyridine.

[1533] The synthesized PCSK9 sequences were cleaved and deprotected in AMA solution (1:1 mixture of methylamine solution and 40% NH3 aqueous solutions) for 3.5 hours or in 40% NH3 aqueous solutions at 55° C. overnight. To deprotect 5′-Vinylphosphonates oligonucleotide, additional 3% of diethyl amine was add to deprotection solution. Preparative ion-pair reverse phase high-performance liquid chromatography (IPRP-HPLC) and IEX-HPLC were applied to purified oligonucleotide products. Samples from each sequence were analyzed by LC-MS to confirm the identity, UV absorbance at 260 nm for quantification and a selected set of samples by IPRP-HPLC and IEX-HPLC to determine purity. The identities and purities of all oligonucleotides were confirmed using electrospray ionization mass spectrometry (ESI-MS), Double stranded RNA was generated by mixing an equimolar solution of complementary strands in water or annealing buffer (typically phosphate buffered solution, PBS, Ambion, Applied Biosystems, Austin, TX) at the desired concentration. The mixture was then heated in a water bath at 85-90° C. for 5 minutes and cooled to room temperature over a period of 1-4 hours. The RNA duplex was stored at −20° C. until use.

[1534] A series siRNA duplexes were designed and synthesized using the techniques described above.

### Example 2. In Vitro Screening Profiling

[1535] siRNA sequences were designed to be complimentary to human PCSK9 transcript variant 1 (GenBank: NM_174936.4) and a few hundreds of RNAi agents (siRNAs) to PCSK9 were screened and tested for off-target hybridization (e.g., less off-target hybridization) and knock-down of PCSK9 mRNA in a cell.

[1536] PCSK9 siRNAs having the nucleotide sequences of U1 to U379 and modification patterns of SS1 (Table 3) and AS1 (Table 4) were synthesized as described above. Cells were transfected with 10 nM or 1 nM siRNA and the amount of PCSK9 mRNA remaining after 24 hours (expressed as PCSK9 mRNA/GAPDH mRNA ratio as percent of control cells) is indicated.

[1537] Table 10 below shows exemplary siRNA sequences tested for in vitro screening and resulting knockdown.

TABLE 10

| | | | 10 nM | 1 nM |
|---|---|---|---|---|
| | SS | AS | hsPCSK9/ | hsPCSK9/ |
| | modifi- | modifi- | hsGAPDH | hsGAPDH |
| PCSK9 | cation | cation | (% of | (% of |
| siRNA | pattern | pattern | control) | control) |
| U1 | SS1 | AS1 | 79 | 95 |
| U2 | SS1 | AS1 | 78 | 120 |
| U3 | SS1 | AS1 | 79 | 112 |
| U4 | SS1 | AS1 | 79 | 128 |
| U5 | SS1 | AS1 | 87 | 116 |
| U6 | SS1 | AS1 | 48 | 84 |
| U7 | SS1 | AS1 | 67 | 106 |
| U8 | SS1 | AS1 | 77 | 91 |
| U9 | SS1 | AS1 | 65 | 88 |
| U10 | SS1 | AS1 | 36 | 68 |
| U11 | SS1 | AS1 | 67 | 109 |
| U12 | SS1 | AS1 | 37 | 99 |
| U13 | SS1 | AS1 | 38 | 88 |
| U14 | SS1 | AS1 | 21 | 54 |
| U15 | SS1 | AS1 | 81 | 121 |
| U16 | SS1 | AS1 | 41 | 51 |
| U17 | SS1 | AS1 | 56 | 67 |
| U18 | SS1 | AS1 | 79 | 63 |
| U19 | SS1 | AS1 | 68 | 68 |
| U20 | SS1 | AS1 | 83 | 56 |
| U21 | SS1 | AS1 | 43 | 64 |
| U22 | SS1 | AS1 | 22 | 21 |
| U23 | SS1 | AS1 | 13 | 35 |
| U24 | SS1 | AS1 | 21 | 32 |
| U25 | SS1 | AS1 | 34 | 72 |
| U26 | SS1 | AS1 | 15 | 30 |
| U27 | SS1 | AS1 | 36 | 81 |
| U28 | SS1 | AS1 | 51 | 90 |
| U29 | SS1 | AS1 | 32 | 66 |
| U30 | SS1 | AS1 | 26 | 67 |
| U31 | SS1 | AS1 | 109 | 92 |
| U32 | SS1 | AS1 | 43 | 80 |
| U33 | SS1 | AS1 | 94 | 109 |
| U34 | SS1 | AS1 | 118 | 96 |
| U35 | SS1 | AS1 | 110 | 97 |
| U36 | SS1 | AS1 | 136 | 100 |
| U37 | SS1 | AS1 | 52 | 93 |
| U38 | SS1 | AS1 | 95 | 106 |
| U39 | SS1 | AS1 | 32 | 63 |
| U40 | SS1 | AS1 | 40 | 69 |
| U41 | SS1 | AS1 | 38 | 82 |
| U42 | SS1 | AS1 | 32 | 75 |
| U43 | SS1 | AS1 | 94 | 111 |
| U44 | SS1 | AS1 | 97 | 110 |
| U45 | SS1 | AS1 | 101 | 113 |
| U46 | SS1 | AS1 | 97 | 111 |
| U47 | SS1 | AS1 | 66 | 103 |
| U48 | SS1 | AS1 | 17 | 55 |
| U49 | SS1 | AS1 | 16 | 57 |
| U50 | SS1 | AS1 | 29 | 68 |
| U51 | SS1 | AS1 | 45 | 75 |
| U52 | SS1 | AS1 | 16 | 31 |
| U53 | SS1 | AS1 | 45 | 86 |
| U54 | SS1 | AS1 | 31 | 46 |
| U55 | SS1 | AS1 | 37 | 62 |
| U56 | SS1 | AS1 | 51 | 79 |
| U57 | SS1 | AS1 | 14 | 31 |
| U58 | SS1 | AS1 | 12 | 19 |
| U59 | SS1 | AS1 | 14 | 23 |
| U60 | SS1 | AS1 | 20 | 44 |
| U61 | SS1 | AS1 | 38 | 110 |
| U62 | SS1 | AS1 | 24 | 72 |
| U63 | SS1 | AS1 | 51 | 131 |
| U64 | SS1 | AS1 | 65 | 130 |
| U65 | SS1 | AS1 | 75 | 132 |
| U66 | SS1 | AS1 | 42 | 99 |
| U67 | SS1 | AS1 | 67 | 136 |
| U68 | SS1 | AS1 | 11 | 32 |
| U69 | SS1 | AS1 | 32 | 105 |
| U70 | SS1 | AS1 | 77 | 124 |
| U71 | SS1 | AS1 | 27 | 71 |
| U72 | SS1 | AS1 | 44 | 87 |
| U73 | SS1 | AS1 | 105 | 114 |
| U74 | SS1 | AS1 | 100 | 109 |
| U75 | SS1 | AS1 | 92 | 119 |
| U76 | SS1 | AS1 | 100 | 114 |
| U77 | SS1 | AS1 | 57 | 119 |
| U78 | SS1 | AS1 | 92 | 123 |
| U79 | SS1 | AS1 | 96 | 118 |
| U80 | SS1 | AS1 | 102 | 129 |
| U81 | SS1 | AS1 | 94 | 135 |
| U82 | SS1 | AS1 | 71 | 116 |
| U83 | SS1 | AS1 | 86 | 104 |
| U84 | SS1 | AS1 | 143 | 115 |
| U85 | SS1 | AS1 | 98 | 93 |
| U86 | SS1 | AS1 | 102 | 76 |
| U87 | SS1 | AS1 | 22 | 42 |
| U88 | SS1 | AS1 | 34 | 43 |
| U89 | SS1 | AS1 | 39 | 52 |
| U90 | SS1 | AS1 | 103 | 73 |
| U91 | SS1 | AS1 | 45 | 116 |
| U92 | SS1 | AS1 | 82 | 154 |
| U93 | SS1 | AS1 | 98 | 136 |
| U94 | SS1 | AS1 | 37 | 70 |
| U95 | SS1 | AS1 | 27 | 53 |
| U96 | SS1 | AS1 | 24 | 52 |
| U97 | SS1 | AS1 | 51 | 69 |
| U98 | SS1 | AS1 | 81 | 73 |
| U99 | SS1 | AS1 | 84 | 65 |
| U100 | SS1 | AS1 | 92 | 69 |
| U101 | SS1 | AS1 | 51 | 86 |
| U102 | SS1 | AS1 | 17 | 45 |
| U103 | SS1 | AS1 | 87 | 81 |
| U104 | SS1 | AS1 | 74 | 72 |
| U105 | SS1 | AS1 | 29 | 40 |
| U106 | SS1 | AS1 | 109 | 66 |
| U107 | SS1 | AS1 | 113 | 63 |
| U108 | SS1 | AS1 | 57 | 45 |
| U109 | SS1 | AS1 | 76 | 53 |
| U110 | SS1 | AS1 | 22 | 14 |
| U111 | SS1 | AS1 | 104 | 108 |
| U112 | SS1 | AS1 | 81 | 110 |
| U113 | SS1 | AS1 | 117 | 99 |
| U114 | SS1 | AS1 | 78 | 76 |
| U115 | SS1 | AS1 | 112 | 74 |
| U116 | SS1 | AS1 | 115 | 70 |
| U117 | SS1 | AS1 | 34 | 29 |
| U118 | SS1 | AS1 | 47 | 51 |
| U119 | SS1 | AS1 | 60 | 56 |
| U120 | SS1 | AS1 | 99 | 55 |
| U121 | SS1 | AS1 | 42 | 87 |
| U122 | SS1 | AS1 | 68 | 87 |
| U123 | SS1 | AS1 | 81 | 82 |
| U124 | SS1 | AS1 | 65 | 79 |
| U125 | SS1 | AS1 | 57 | 92 |
| U126 | SS1 | AS1 | 79 | 77 |
| U127 | SS1 | AS1 | 61 | 71 |
| U128 | SS1 | AS1 | 72 | 83 |
| U129 | SS1 | AS1 | 89 | 77 |
| U130 | SS1 | AS1 | 87 | 80 |
| U131 | SS1 | AS1 | 54 | 83 |
| U132 | SS1 | AS1 | 68 | 87 |
| U133 | SS1 | AS1 | 49 | 67 |
| U134 | SS1 | AS1 | 42 | 62 |
| U135 | SS1 | AS1 | 68 | 74 |
| U136 | SS1 | AS1 | 66 | 75 |
| U137 | SS1 | AS1 | 60 | 72 |
| U138 | SS1 | AS1 | 49 | 81 |
| U139 | SS1 | AS1 | 54 | 72 |
| U140 | SS1 | AS1 | 10 | 16 |
| U141 | SS1 | AS1 | 11 | 24 |
| U142 | SS1 | AS1 | 24 | 39 |
| U143 | SS1 | AS1 | 23 | 54 |
| U144 | SS1 | AS1 | 18 | 44 |
| U145 | SS1 | AS1 | 14 | 30 |
| U146 | SS1 | AS1 | 14 | 37 |
| U147 | SS1 | AS1 | 32 | 63 |
| U148 | SS1 | AS1 | 74 | 77 |
| U149 | SS1 | AS1 | 87 | 69 |
| U150 | SS1 | AS1 | 94 | 84 |
| U151 | SS1 | AS1 | 89 | 86 |
| U152 | SS1 | AS1 | 79 | 108 |
| U153 | SS1 | AS1 | 73 | 79 |
| U154 | SS1 | AS1 | 70 | 90 |
| U155 | SS1 | AS1 | 73 | 92 |
| U156 | SS1 | AS1 | 69 | 118 |
| U157 | SS1 | AS1 | 70 | 88 |
| U158 | SS1 | AS1 | 69 | 100 |
| U159 | SS1 | AS1 | 75 | 85 |
| U160 | SS1 | AS1 | 75 | 87 |
| U161 | SS1 | AS1 | 78 | 84 |
| U162 | SS1 | AS1 | 62 | 99 |
| U163 | SS1 | AS1 | 52 | 87 |
| U164 | SS1 | AS1 | 62 | 81 |
| U165 | SS1 | AS1 | 54 | 97 |
| U166 | SS1 | AS1 | 71 | 96 |
| U167 | SS1 | AS1 | 68 | 94 |
| U168 | SS1 | AS1 | 86 | 98 |
| U169 | SS1 | AS1 | 57 | 88 |
| U170 | SS1 | AS1 | 34 | 68 |
| U171 | SS1 | AS1 | 78 | 75 |
| U172 | SS1 | AS1 | 76 | 116 |
| U173 | SS1 | AS1 | 63 | 102 |
| U174 | SS1 | AS1 | 72 | 80 |
| U175 | SS1 | AS1 | 32 | 77 |
| U176 | SS1 | AS1 | 39 | 83 |
| U177 | SS1 | AS1 | 52 | 75 |
| U178 | SS1 | AS1 | 52 | 73 |
| U179 | SS1 | AS1 | 62 | 78 |
| U180 | SS1 | AS1 | 68 | 88 |
| U181 | SS1 | AS1 | 80 | 72 |
| U182 | SS1 | AS1 | 63 | 96 |
| U183 | SS1 | AS1 | 23 | 80 |
| U184 | SS1 | AS1 | 66 | 94 |
| U185 | SS1 | AS1 | 67 | 99 |
| U186 | SS1 | AS1 | 38 | 86 |
| U187 | SS1 | AS1 | 22 | 70 |
| U188 | SS1 | AS1 | 76 | 91 |
| U189 | SS1 | AS1 | 58 | 89 |
| U190 | SS1 | AS1 | 31 | 61 |
| U191 | SS1 | AS1 | 26 | 64 |
| U192 | SS1 | AS1 | 72 | 83 |
| U193 | SS1 | AS1 | 20 | 38 |
| U194 | SS1 | AS1 | 51 | 83 |
| U195 | SS1 | AS1 | 48 | 77 |
| U196 | SS1 | AS1 | 69 | 87 |
| U197 | SS1 | AS1 | 74 | 94 |
| U198 | SS1 | AS1 | 50 | 93 |
| U199 | SS1 | AS1 | 60 | 90 |
| U200 | SS1 | AS1 | 82 | 98 |
| U201 | SS1 | AS1 | 69 | 86 |
| U202 | SS1 | AS1 | 22 | 60 |
| U203 | SS1 | AS1 | 35 | 83 |
| U204 | SS1 | AS1 | 85 | 99 |
| U205 | SS1 | AS1 | 82 | 97 |
| U206 | SS1 | AS1 | 78 | 88 |
| U207 | SS1 | AS1 | 64 | 93 |
| U208 | SS1 | AS1 | 39 | 67 |
| U209 | SS1 | AS1 | 13 | 31 |
| U210 | SS1 | AS1 | 24 | 45 |
| U211 | SS1 | AS1 | 30 | 71 |
| U212 | SS1 | AS1 | 38 | 81 |
| U213 | SS1 | AS1 | 43 | 77 |
| U214 | SS1 | AS1 | 89 | 96 |
| U215 | SS1 | AS1 | 72 | 99 |
| U216 | SS1 | AS1 | 39 | 89 |
| U217 | SS1 | AS1 | 66 | 94 |
| U218 | SS1 | AS1 | 52 | 98 |
| U219 | SS1 | AS1 | 73 | 101 |
| U220 | SS1 | AS1 | 90 | 117 |
| U221 | SS1 | AS1 | 102 | 101 |
| U222 | SS1 | AS1 | 91 | 82 |
| U223 | SS1 | AS1 | 92 | 73 |
| U224 | SS1 | AS1 | 86 | 72 |
| U225 | SS1 | AS1 | 87 | 79 |
| U226 | SS1 | AS1 | 75 | 80 |
| U227 | SS1 | AS1 | 85 | 76 |
| U228 | SS1 | AS1 | 87 | 88 |
| U229 | SS1 | AS1 | 73 | 78 |
| U230 | SS1 | AS1 | 51 | 68 |
| U231 | SS1 | AS1 | 80 | 99 |
| U232 | SS1 | AS1 | 29 | 43 |
| U233 | SS1 | AS1 | 104 | 85 |
| U234 | SS1 | AS1 | 86 | 85 |
| U235 | SS1 | AS1 | 87 | 88 |
| U236 | SS1 | AS1 | 86 | 95 |
| U237 | SS1 | AS1 | 88 | 93 |
| U238 | SS1 | AS1 | 85 | 87 |
| U239 | SS1 | AS1 | 52 | 88 |
| U240 | SS1 | AS1 | 66 | 88 |
| U241 | SS1 | AS1 | 80 | 92 |
| U242 | SS1 | AS1 | 82 | 97 |
| U243 | SS1 | AS1 | 79 | 88 |
| U244 | SS1 | AS1 | 16 | 43 |
| U245 | SS1 | AS1 | 57 | 82 |
| U246 | SS1 | AS1 | 33 | 69 |
| U247 | SS1 | AS1 | 44 | 87 |
| U248 | SS1 | AS1 | 41 | 83 |
| U249 | SS1 | AS1 | 96 | 102 |
| U250 | SS1 | AS1 | 98 | 97 |
| U251 | SS1 | AS1 | 75 | 81 |
| U252 | SS1 | AS1 | 65 | 82 |
| U253 | SS1 | AS1 | 84 | 85 |
| U254 | SS1 | AS1 | 70 | 88 |
| U255 | SS1 | AS1 | 57 | 87 |
| U256 | SS1 | AS1 | 77 | 95 |
| U257 | SS1 | AS1 | 64 | 87 |
| U258 | SS1 | AS1 | 75 | 94 |
| U259 | SS1 | AS1 | 101 | 87 |
| U260 | SS1 | AS1 | 90 | 95 |
| U261 | SS1 | AS1 | 41 | 88 |
| U262 | SS1 | AS1 | 80 | 91 |
| U263 | SS1 | AS1 | 59 | 104 |
| U264 | SS1 | AS1 | 76 | 105 |
| U265 | SS1 | AS1 | 63 | 96 |
| U266 | SS1 | AS1 | 78 | 98 |
| U267 | SS1 | AS1 | 79 | 103 |
| U268 | SS1 | AS1 | 57 | 41 |
| U269 | SS1 | AS1 | 72 | 98 |
| U270 | SS1 | AS1 | 45 | 77 |
| U271 | SS1 | AS1 | 24 | 57 |
| U272 | SS1 | AS1 | 21 | 61 |
| U273 | SS1 | AS1 | 30 | 59 |
| U274 | SS1 | AS1 | 96 | 103 |
| U275 | SS1 | AS1 | 96 | 104 |
| U276 | SS1 | AS1 | 37 | 99 |
| U277 | SS1 | AS1 | 78 | 115 |
| U278 | SS1 | AS1 | 74 | 73 |
| U279 | SS1 | AS1 | 76 | 81 |
| U280 | SS1 | AS1 | 32 | 82 |
| U281 | SS1 | AS1 | 37 | 89 |
| U282 | SS1 | AS1 | 23 | 54 |
| U283 | SS1 | AS1 | 47 | 92 |
| U284 | SS1 | AS1 | 17 | 35 |
| U285 | SS1 | AS1 | 53 | 91 |
| U286 | SS1 | AS1 | 115 | 133 |
| U287 | SS1 | AS1 | 92 | 112 |
| U288 | SS1 | AS1 | 92 | 118 |
| U289 | SS1 | AS1 | 46 | 105 |
| U290 | SS1 | AS1 | 102 | 121 |
| U291 | SS1 | AS1 | 63 | 93 |
| U292 | SS1 | AS1 | 69 | 115 |
| U293 | SS1 | AS1 | 88 | 103 |
| U294 | SS1 | AS1 | 91 | 97 |
| U295 | SS1 | AS1 | 96 | 113 |
| U296 | SS1 | AS1 | 75 | 112 |
| U297 | SS1 | AS1 | 81 | 115 |
| U298 | SS1 | AS1 | 49 | 100 |
| U299 | SS1 | AS1 | 53 | 113 |
| U300 | SS1 | AS1 | 28 | 75 |
| U301 | SS1 | AS1 | 83 | 69 |
| U302 | SS1 | AS1 | 41 | 50 |
| U303 | SS1 | AS1 | 29 | 40 |
| U304 | SS1 | AS1 | 20 | 30 |
| U305 | SS1 | AS1 | 24 | 39 |
| U306 | SS1 | AS1 | 35 | 49 |
| U307 | SS1 | AS1 | 31 | 47 |
| U308 | SS1 | AS1 | 52 | 52 |
| U309 | SS1 | AS1 | 54 | 73 |
| U310 | SS1 | AS1 | 23 | 29 |
| U311 | SS1 | AS1 | 46 | 80 |
| U312 | SS1 | AS1 | 94 | 86 |
| U313 | SS1 | AS1 | 21 | 42 |
| U314 | SS1 | AS1 | 29 | 50 |
| U315 | SS1 | AS1 | 31 | 61 |
| U316 | SS1 | AS1 | 50 | 96 |
| U317 | SS1 | AS1 | 41 | 74 |
| U318 | SS1 | AS1 | 95 | 115 |
| U319 | SS1 | AS1 | 59 | 97 |
| U320 | SS1 | AS1 | 137 | 107 |
| U321 | SS1 | AS1 | 65 | 85 |
| U322 | SS1 | AS1 | 46 | 75 |
| U323 | SS1 | AS1 | 31 | 66 |
| U324 | SS1 | AS1 | 62 | 81 |
| U325 | SS1 | AS1 | 21 | 48 |
| U326 | SS1 | AS1 | 38 | 62 |
| U327 | SS1 | AS1 | 14 | 17 |
| U328 | SS1 | AS1 | 17 | 21 |
| U329 | SS1 | AS1 | 17 | 22 |
| U330 | SS1 | AS1 | 42 | 76 |
| U331 | SS1 | AS1 | 17 | 41 |
| U332 | SS1 | AS1 | 26 | 49 |
| U333 | SS1 | AS1 | 49 | 77 |
| U334 | SS1 | AS1 | 66 | 79 |
| U335 | SS1 | AS1 | 73 | 81 |
| U336 | SS1 | AS1 | 36 | 65 |
| U337 | SS1 | AS1 | 44 | 81 |
| U338 | SS1 | AS1 | 48 | 76 |
| U339 | SS1 | AS1 | 17 | 37 |
| U340 | SS1 | AS1 | 14 | 17 |
| U341 | SS1 | AS1 | 13 | 23 |
| U342 | SS1 | AS1 | 10 | 16 |
| U343 | SS1 | AS1 | 11 | 15 |
| U344 | SS1 | AS1 | 22 | 53 |
| U345 | SS1 | AS1 | 23 | 49 |
| U346 | SS1 | AS1 | 24 | 61 |
| U347 | SS1 | AS1 | 33 | 77 |
| U348 | SS1 | AS1 | 19 | 40 |
| U349 | SS1 | AS1 | 17 | 13 |
| U350 | SS1 | AS1 | 15 | 14 |
| U351 | SS1 | AS1 | 14 | 20 |
| U352 | SS1 | AS1 | 12 | 21 |
| U353 | SS1 | AS1 | 12 | 12 |
| U354 | SS1 | AS1 | 13 | 17 |
| U355 | SS1 | AS1 | 15 | 17 |
| U356 | SS1 | AS1 | 9 | 16 |
| U357 | SS1 | AS1 | 9 | 16 |
| U358 | SS1 | AS1 | 13 | 22 |
| U359 | SS1 | AS1 | 13 | 14 |
| U360 | SS1 | AS1 | 14 | 16 |
| U361 | SS1 | AS1 | 12 | 14 |
| U362 | SS1 | AS1 | 14 | 14 |
| U363 | SS1 | AS1 | 15 | 17 |
| U364 | SS1 | AS1 | 16 | 19 |
| U365 | SS1 | AS1 | 11 | 15 |
| U366 | SS1 | AS1 | 11 | 16 |
| U367 | SS1 | AS1 | 12 | 22 |
| U368 | SS1 | AS1 | 15 | 20 |
| U369 | SS1 | AS1 | 10 | 16 |
| U370 | SS1 | AS1 | 8 | 13 |
| U371 | SS1 | AS1 | 13 | 24 |
| U372 | SS1 | AS1 | 12 | 20 |
| U373 | SS1 | AS1 | 15 | 19 |
| U374 | SS1 | AS1 | 21 | 42 |
| U375 | SS1 | AS1 | 25 | 46 |
| U376 | SS1 | AS1 | 12 | 24 |
| U377 | SS1 | AS1 | 9 | 20 |
| U378 | SS1 | AS1 | 8 | 20 |
| U379 | SS1 | AS1 | 6 | 15 |

### Example 3. In Vitro Dose-Dependent Screening

### Dual Dose Screening in A431 Cells:

[1538] A431 cells (ATCC. Cat. CRL-1555) were cultured in DMEM (ATCC. Cat. 30-2002) medium containing 10% FBS at 37 C with 5% CO₂. Cells were seeded in a 96-well plate and reverse transfected using RNAiMax (Thermo. RNAiMax. Cat. 13778150) with either 10 nM or 1 nM of siRNA and 24 hrs post transfection knockdown of PCSK9 was determined by Branch DNA assay. The degree of knock-down as calculated from the ratio of PCSK9 signal to GAPDH signal.

### Dose Response Curves in A431 Cells

[1539] A431 cells (ATCC. Cat. CRL-1555) were cultured in DMEM (ATCC. Cat. 30-2002) medium containing 10% FBS at 37° C. with 5% CO2. Cells were seeded in a 96-well plate and reverse transfected using RNAiMax (Thermo. RNAiMax. Cat. 13778150) in a 10-step dose range starting with 25 nM using a 1:4 dilution factor. Remaining PCSK9 mRNA levels were measured 24 hrs post transfection by Branch DNA assay. The degree of knock-down as calculated from the ratio of PCSK9 signal to GAPDH signal. Degree of knock-down vs. siRNA concentration data were used to determine the IC50 and maximum inhibition (%).

[1540] PCSK9 siRNAs having the nucleotide sequences in Table 11 with modification patterns of SS1 (Table 3) and AS1 (Table 4) were synthesized as described above. The IC50 and maximum inhibition (%) values for each of these siRNAs are shown in Table 11.

TABLE 11

| Unmodified | SS | AS | | max. |
|---|---|---|---|---|
| PCSK9 | Modification | Modification | | inhib. |
| siRNA | pattern | pattern | IC₅₀ | [%] |
| U4 | SS1 | AS1 | 0.60 | 82.31 |
| U22 | SS1 | AS1 | 0.03 | 84.01 |
| U23 | SS1 | AS1 | 0.41 | 91.92 |
| U24 | SS1 | AS1 | 0.37 | 85.78 |
| P13 | SS1 | AS1 | 0.29 | 83.04 |
| U49 | SS1 | AS1 | 0.81 | 77.80 |
| U52 | SS1 | AS1 | 0.19 | 89.17 |
| U57 | SS1 | AS1 | 0.31 | 89.55 |
| P5 | SS1 | AS1 | 0.09 | 93.45 |
| U59 | SS1 | AS1 | 0.23 | 91.38 |
| U68 | SS1 | AS1 | 0.21 | 87.78 |
| U102 | SS1 | AS1 | 0.63 | 83.59 |
| P14 | SS1 | AS1 | 0.86 | 78.40 |
| U110 | SS1 | AS1 | 0.24 | 88.69 |
| U117 | SS1 | AS1 | 0.42 | 81.33 |
| U140 | SS1 | AS1 | 0.17 | 92.29 |
| U145 | SS1 | AS1 | 0.14 | 87.78 |
| U145 | SS1 | AS1 | 0.51 | 89.52 |
| U146 | SS1 | AS1 | 0.23 | 91.65 |
| U244 | SS1 | AS1 | 0.44 | 82.97 |
| U284 | SS1 | AS1 | 0.18 | 87.39 |
| U304 | SS1 | AS1 | 0.27 | 86.28 |
| P15 | SS1 | AS1 | 0.21 | 88.27 |
| U327 | SS1 | AS1 | 0.09 | 86.93 |
| U331 | SS1 | AS1 | 0.37 | 79.77 |
| P8 | SS1 | AS1 | 0.15 | 87.19 |
| U340 | SS1 | AS1 | 0.09 | 82.52 |
| U342 | SS1 | AS1 | 0.04 | 91.65 |
| U343 | SS1 | AS1 | 0.03 | 92.39 |
| U349 | SS1 | AS1 | 0.02 | 89.46 |
| U352 | SS1 | AS1 | 0.07 | 91.33 |
| U353 | SS1 | AS1 | 0.02 | 89.05 |
| U355 | SS1 | AS1 | 0.01 | 89.15 |
| U356 | SS1 | AS1 | 0.06 | 91.66 |
| U357 | SS1 | AS1 | 0.07 | 93.90 |
| U359 | SS1 | AS1 | 0.04 | 86.60 |
| U361 | SS1 | AS1 | 0.04 | 85.82 |
| U362 | SS1 | AS1 | 0.03 | 90.59 |
| U364 | SS1 | AS1 | 0.05 | 87.51 |
| U365 | SS1 | AS1 | 0.03 | 91.67 |
| U366 | SS1 | AS1 | 0.03 | 86.00 |
| U369 | SS1 | AS1 | 0.03 | 87.43 |
| U370 | SS1 | AS1 | 0.04 | 89.91 |
| U373 | SS1 | AS1 | 0.03 | 84.65 |
| U377 | SS1 | AS1 | 0.03 | 87.86 |
| U378 | SS1 | AS1 | 0.03 | 86.45 |
| U379 | SS1 | AS1 | 0.01 | 90.92 |
| P16 | SS1 | AS1 | 0.24 | 81.02 |

### Example 4. In Vivo Profiling in Mice with Humanized PCSK9

[1541] Human PCSK9 knockin/murine PCSK9 knockout mice (B6-huPCSK9-UTR mice) were obtained from GemPharmaTech. The mice (n=4 mice per group) were fed a standard chow diet. For PK/PD studies, mice were administered phosphate-buffered saline (PBS) vehicle or 3 mg/kg siRNA in PBS by subcutaneous (SC) injection. Plasma was prepared from blood samples obtained via tail-nick at baseline (pre-dose) and at multiple post-dose timepoints from non-fasted mice. At the study endpoint, mice were sacrificed and liver samples were obtained for assessment of human PCSK9 mRNA levels, liver tissue siRNA levels, and level of siRNA loading into the RNA-induced silencing complex (RISC).

### Plasma Human PCSK9 ELISA

[1542] PCSK9 protein concentrations in plasma samples were determined using a human PCSK9 ELISA kit from R&D Systems (catalog no. SPC900). Reagents and plasma samples were brought to room temperature before use. Plasma samples were diluted 1:2, 1:5 or 1:25 by adding 62.5 μL, 25 μL, or 5 μL, respectively, of plasma sample to 62.5 μL, 100 μL, or 120 μL, respectively, of 1× Calibrator Diluent and mixing by pipetting. Cynomolgus monkey PCSK9 standard protein was diluted to 40 ng/mL using Calibrator Diluent, then six serial 1:2 dilutions were made. To each well of a 96-well plate pre-coated with capture antibody, Assay Diluent was added (100 μL/well) followed by diluted plasma sample or standard (50 μL/well). All plasma samples and standards were run in duplicate on the same plate. The plate was then sealed and incubated at room temperature for 105 minutes on a plate shaker. After incubation, the plate was flipped upside down with force to remove liquid from the wells and then blotted with a paper towel to absorb remaining solution. Wash Buffer was then added to each well (400 μL/well) using a plate washer. The plate was then flipped with force to remove liquid from the wells and blotted with a paper towel. This step was repeated three times for a total of four washes. Next, detection antibody (Human PCSK9 Conjugate) was added to each well (200 μL/well). The plate was then sealed and incubated at room temperature for 105 minutes on a plate shaker. After incubation, the plate was washed four times, as described previously. Equal volumes of Color Reagent A and Color Reagent B were then added to a 50 mL conical tube and mixed via inversion to create the Substrate Solution. Substrate Solution was then added to each well (200 μL/well). The plate was then sealed, shielded from light and incubated at room temperature for 30 minutes on a plate shaker. After incubation, Stop Solution (50 μL) was added to each well and mixed by swirling pipette tips in the wells (without touching the bottom) until the color of the solution changed from blue to a uniform yellow color. The absorbance of each well at 450 nm was then measured using a Molecular Devices Spectramax M2 plate reader. The absorbance values for the standards were used to construct a standard curve. Plasma PCSK9 concentrations for each sample were then determined from the observed absorbance for that sample and the standard curve by interpolation, followed by adjustment for the 1:2, 1:5, or 1:25 sample dilution factor. Reported PCSK9 concentrations are the average values from two replicate wells from the same plate.

Liver Human PCSK9 mRNA Assessments

[1543] Liver RNA extraction was performed using a TRIZOL® RNA Isolation protocol followed by an Qiagen RNeasy MiniPrep protocol. Briefly, an approximately 50 mg piece of frozen liver was lysed and homogenized using a Tissue Lyser II (Qiagen, Germany) with one stainless steel bead and TRIZOL® lysis reagent (Invitrogen, Carlsbad CA). Next, chloroform was added, and phases were separated. RNA was precipitated using isopropyl alcohol and washed with 75% ethanol. RNA was bound, washed, and eluted from RNeasy mini spin columns (Qiagen, Germany). The optional on column DNase digestion was performed using the RNase free DNase set (Qiagen, Germany). A total of 100 μL of RNA was eluted from each sample. RNA samples were quantified using a BioTek Take3 Trio Microvolume Plate (Agilent, Santa Clara CA) in a BioTek Cytation 5 plate reader (Agilent, Santa Clara CA). Quantified RNA samples were diluted then reverse transcribed using TaqMan™ Reverse Transcription Reagents (ThermoFisher, Waltham MA). TaqMan™ qPCR was performed with the cDNA samples using TaqMan™ gene expression assays for mouse TATA binding protein (catalog #Mm00446971_m1) and human PCSK9 (catalog #Hs00545399_m1) according to the manufacturer's instructions (ThermoFisher, Waltham MA). The human PCSK9 level in each sample was normalized using that sample's level of the housekeeping gene TATA binding protein.

Liver siRNA Level Measurements

[1544] Tissue lysis: each frozen tissue piece (˜50 mg) was transferred to a 2 mL round bottom microcentrifuge tube that was pre-chilled on dry ice. One dry ice pre-chilled 5 mm stainless steel bead (Qiagen, Germany) was added to the tube containing the frozen tissue. In the cold room, sample tubes were quickly removed from dry ice and 1 mL of ice-cold Lysis buffer (50 mM Tris-HCl pH 7.5, 150 mM NaCl, 2 mM EDTA, 1 mM PMSF, 1× protease inhibitor, 0.5% Triton X-100)was added to each tube. Tissues were then immediately lysed using a TissueLyser LT (Qiagen, Germany) for 5 min at 50 Hz in cold room. The lysate was then cleared by centrifugation at 20000×g and 4° C. for 10 min, and the soluble lysate supernatants were kept on ice or stored at −80° C. for subsequent analysis.

[1545] Stem Loop-Reverse Transcription Quantitative polymerase chain reaction (SL-RT-qPCR): Liver lysates were diluted in PBST (PBS, 0.25% Triton X-100) at least 100-fold (typically 10000-fold) in PBST prior to the reverse transcription step. For the detection of siRNA via SL-RT-qPCR, primers were designed against the antisense strand sequence of interest using the design tool on the vendor website (Custom Taqman Small RNA Assay, 4398987, ThermoFisher, Waltham MA). Each custom Taqman primer set contains a SL-RT primer and Taqman qPCR primer specific to the antisense strand sequence of interest. cDNA was generated by following the manufacturer's protocol of the Taqman MicroRNA Reverse Transcription Kit (ThermoFisher, Waltham MA), using 5 μL diluted lysate in PBST or 5 μL siRNA standard. The cDNA generated (15 μL reaction) were then diluted with 15 μL water prior to the qPCR step. qPCR was performed following the manufacturer's protocol for TaqMan™ Fast Advanced Master Mix (ThermoFisher, Waltham MA), using 4 μL of the diluted cDNA.

[1546] Calculations: siRNA standards were prepared in PBST by 10-fold serial dilution, starting at 100 ng/mL down to 0.0001 ng/mL. Ct values obtained from each standard were plotted on (Y) vs siRNA concentration (X) in log scale in GraphPad Prism. A semilog line was fitted to determine the slope and y-intercept values. siRNA concentration (x) for each sample was then determined based on the obtained Ct value (y), and the determined slope (m) and y-intercept (b) values from the standard curve based on the equation y=mx+b. To calculate total liver siRNA (ng siRNA per g tissue), the following operations were performed: 1) Volume of total lysate=1000 mL Lysis buffer plus tissue volume (assuming 1 μL per mg of tissue sample), 2) ng siRNA=[siRNA]×Volume of total lysate×dilution factor, and 3) total liver siRNA (ng/g tissue)=ng siRNA/g sample tissue weight.

### Liver RISC Loading Experiments

[1547] Tissue lysis: each frozen tissue piece (˜50 mg) was transferred to a 2 mL round bottom microcentrifuge tube that was pre-chilled on dry ice. One dry ice pre-chilled 5 mm stainless steel bead (Qiagen, Germany) was added to the tube containing the frozen tissue. In the cold room, sample tubes were quickly removed from dry ice and 1 mL of ice-cold Lysis buffer (50 mM Tris-HCl pH 7.5, 150 mM NaCl, 2 mM EDTA, 1 mM PMSF, 1× protease inhibitor, 0.5% Triton X-100) was added to each tube. Tissues were then immediately lysed using a TissueLyser LT (Qiagen, Germany) for 5 min at 50 Hz in a cold room. Lysate was then cleared by centrifugation at 20000×g at 4° C. for 10 min, and the soluble lysate supernatants were kept on ice. The protein concentration of the soluble lysate for each sample was determined using a BCA assay (ThermoFisher, Waltham MA) according to manufacturer's protocol.

[1548] Ago2 immunoprecipitation (IP): for IP, 50 μL of Dynabead Protein G (ThermoFisher, Waltham MA) slurry was used per sample. Prior to use for IP, the beads were washed with at least 2× volume of Wash Buffer (150 mM NaCl, 2 mM EDTA, 0.5% Triton X-100), and then resuspended in 4× volume of Wash Buffer. Mouse Ago2 antibody (FUJFILM Wako Chemicals, Richmond VA) was pre-bound to the beads in Wash Buffer (200 ng antibody per 50 μL bead slurry) at 4° C. for 2 h on a rotating mixer. After incubation, the Ago2 antibody-bound beads were washed twice with 10 volumes of Wash buffer, and then resuspended in Lysis Buffer. Bead suspension equivalent to amount of 50 μL original bead slurry was distributed to a 1.5 mL microcentrifuge tube per sample. For each sample, Ago2 antibody-bound beads were incubated with 500 mg soluble tissue lysate in lysis buffer at final volume of 250 μL per sample at 4° C. overnight on a rotating mixer. After incubation, the beads in each tube were washed 5 times with 1 mL ice cold Wash Buffer. The beads were then resuspended in 50 mL of PBST per sample. siRNAs were released from the beads by heating at 95° C. for 5 min. Ago2 IP eluate supernatants were recovered and kept on ice for SL-RT-qPCR analysis on the same day, or stored at −80° C. for SL-RT-qPCR on a later day.

[1549] Stem Loop-Reverse Transcription Quantitative polymerase chain reaction (SL-RT-qPCR): For detection of siRNA via SL-RT-qPCR, primers were designed against the antisense strand sequence of interest using the design tool on the vendor website (Custom Taqman Small RNA Assay, 4398987, ThermoFisher, Waltham MA). Each custom Taqman primer set contains a SL-RT primer and Taqman qPCR primer specific to the antisense strand sequence of interest. cDNA was generated following manufacturer's protocol of the Taqman MicroRNA Reverse Transcription Kit (ThermoFisher, Waltham MA), using 5 mL of Ago2 IP eluate or 5 mL siRNA standard. The cDNA generated (15 μL reaction) were then diluted with 75 mL water prior to usage for the qPCR step. qPCR was performed following the manufacturer's protocol for TaqMan™ Fast Advanced Master Mix (ThermoFisher, Waltham MA), using 4 mL of the diluted cDNA.

[1550] Calculations: siRNA standards were prepared in PBST by 10-fold serial dilution, starting at 100 ng/mL down to 0.00001 ng/mL. Ct values obtained from each standard were plotted on (Y) vs siRNA concentration (X) in log scale in GraphPad Prism. A semilog line was fitted to determine the slope and y-intercept values. The siRNA concentration (x) for each sample was then determined based on the obtained Ct value (y), and the determined slope (m) and y-intercept (b) values from the standard curve based on the equation y=mx+b. To calculate ng siRNA loaded on RISC per g tissue, the following operations were performed: 1) ng siRNA=[siRNA]×Ago2 IP elution volume (50 mL), 2) [tissue lysate]=mg tissue per 1 mL lysis buffer, 3) g tissue used=[tissue lysate]×volume lysate used in Ago2 IP, and 4) RISC-loading (ng/g tissue)=ng siRNA/g tissue used.

Results of siRNA In Vivo Profiling

[1551] Leqvio® (inclisiran) is a small interfering ribonucleic acid (siRNA) targeting hepatic PCSK9 mRNA to lower plasma LDL-C levels. The dsRNAi agent D1 described herein includes the same sense and antisense strand sequences and chemical modifications as inclisiran, but a different GalNAc ligand. The pharmacodynamic (PD) and pharmacokinetic (PK) properties of a number of dsRNAi agents (D1-D6) described herein were evaluated in B6-huPCSK9-UTR mice administered PBS vehicle or 3 mg/kg siRNA in PBS via subcutaneous injection. As shown in FIG. 1A, administration of each of these siRNAs, with the exception of D6, resulted in a similar decrease of plasma PCSK9 from pre-dose baseline on day 7 after dosing. Monitoring of plasma PCSK9 levels at timepoints up to the conclusion of the study on day 56 showed that some of the siRNAs, e.g. D4, had longer durability of action compared to D1. On day 56 post-dose, mice treated with D4 had lower liver PCSK9 mRNA level, higher liver siRNA level, and higher amount of siRNA associated with Argonaute-2 (Ago2) in the liver (i.e., had higher liver RISC loading) compared to mice treated with D1 (FIG. 1).

[1552] In B6-huPCSK9-UTR mice, administration (3 mg/kg subcutaneous injection) of inclisiran (D7) or D8, an siRNA with the same structure as D4, except for a different ligand including a GalNAc moiety (i.e., the same GalNAc ligand as in D7), D9 or D10 resulted in similar reductions of plasma PCSK9 levels on day 7 post-dose. Monitoring of plasma PCSK9 levels over time showed that D8, D9, and D10 administration resulted in more durable plasma PCSK9 suppression compared to inclisiran (D7) (FIG. 2A). On day 77 post-dose, D8 administration resulted in greater liver PCSK9 mRNA suppression, higher liver siRNA concentration, and higher liver RISC loading compared to mice administered inclisiran (D7) (FIG. 2B).

[1553] In B6-huPCSK9-UTR mice, administration (3 mg/kg subcutaneous injection) of the siRNAs D1, D4, D11, and D12 resulted in similar extents of plasma PCSK9 reduction from baseline on day 7 post-dose. As observed in a previous study (see FIG. 1A), administration of D4 resulted in more durable plasma PCSK9 suppression compared to D1 (FIG. 3A). Compared to D11 administration, administration of D12 (which has the same structure as D11 except for the addition of two phosphorothioate linkages) resulted in more durable plasma PCSK9 suppression (FIG. 3A) and lower liver PCSK9 mRNA level, higher liver siRNA concentration, and higher liver RISC loading on day 63 post-dose (FIG. 3B).

[1554] Administration of the siRNAs D4, D14, D15, D16 or D17 resulted in similar decreases in plasma PCSK9 levels on day 7 post-dose (FIG. 4A). Compared to administration of D4, administration of D14 (an siRNA with the same structure as D4 except for the 2 additional phosphorothioate linkages), D15, D16 or D17 resulted in more durable plasma PCSK9 suppression from baseline over time (FIG. 4A). Compared to D4, D14 administration resulted in greater liver PCSK9 mRNA suppression, increased liver siRNA concentration, and increased liver RISC loading on day 77 post-dose (FIG. 4B).

[1555] Administration of the siRNAs D4, D18, D19, D20, D21, D22, or D23 to B6-huPCSK9-UTR mice resulted in similar plasma PCSK9 reduction from baseline on day 7 post-dose (FIG. 5A). Monitoring of plasma PCSK9 change from baseline over time showed that, compared to D4, administration of D18, D19, D20, D21, D22 or D23 resulted in more durable plasma PCSK9 suppression (FIG. 5A). Compared to D4, D19 and D21 administration resulted in lower liver PCSK9 mRNA level, higher liver siRNA concentration, and higher liver RISC loading on day 77 post-dose (FIG. 5B).

[1556] The PK/PD activities in B6-huPCSK9-UTR mice of seven siRNAs (D4, D13, D24, D25, D26, D27, and D28) were assessed. Compared to D4, administration of 2 of the siRNAs (D27 and D28) resulted in much less suppression of plasma PCSK9 levels on day 7 post-dose and over time during the course of the study (FIG. 6A). The siRNAs D13, D24, D25, and D26 had similar suppression of plasma PCSK9 levels on day 7 and similar durability of plasma PCSK9 suppression as D4. The effects of these siRNAs on liver PCSK9 mRNA levels, liver siRNA concentrations, and liver RISC loading on day 63 post-dose are shown in FIG. 6B.

[1557] The PK/PD activities in B6-huPCSK9-UTR mice of 7 siRNAs with different nucleotide sequences than inclisiran (D25, D29, D30, D31, D32, D33, and D34) were evaluated. Several of the siRNAs (D29, D30, D31, and D33) caused less suppression of plasma PCSK9 at day 7 post-dose compared to the D25, D32 and D34, which caused similar plasma PCSK9 suppression on day 7 post-dose. Among the siRNAs in this study, D25 and D34 administration resulted in the greatest suppression of plasma PCSK9 on day 64 post-dose (FIG. 7A). The effects of these siRNAs on liver PCSK9 mRNA levels, liver siRNA concentrations, and liver RISC loading on day 64 post-dose are shown in FIG. 7B.

[1558] The siRNAs D4, D15, D35, D36, D37 and D38, which have various nucleotide sequences, were administered to B6-huPCSK9-UTR mice. Among these siRNAs, D15, D36 and D38 caused the greatest suppression of plasma PCSK9 levels relative to baseline on day 76 post-dose (FIG. 8A). Compared to D4, administration of D38 resulted in greater liver PCSK9 mRNA reduction, similar liver siRNA concentrations, and greater liver RISC loading on day 77 post-dose (FIG. 8B).

[1559] The siRNAs D15, D38, D39, D40, D41, D42, D43, D44, D45, D46, D4, and D48 were administered via a single 3 mg/kg subcutaneous injection to B6-huPCSK9-UTR mice. The effects of the siRNAs on plasma PCSK9 levels up to day 77 post-dose are shown in FIG. 10A; for clarity, subsets of this data are shown in separate graphs in FIG. 10B. D39, D40, and D41, which have a GNA nucleotide in position 5, 6, and 7, respectively, of the antisense strand, had reduced PCSK9 suppression compared to D38 at all post-dose timepoints (FIG. 10B). D42, D43, and D44, which have a TNA nucleotide in position 5, 6, and 7, respectively, of the antisense strand, caused similar PCSK9 suppression compared to D38 at all post-dose timepoints (FIG. 10B). D45, D46, and D47, which have a DNA nucleotide in position 5, 6, and 7, respectively, of the antisense strand, caused similar PCSK9 suppression at all post-dose timepoints (FIG. 10B). D48, which has a 2′-OMe-U nucleotide at position 3 of the antisense strand and a 2′-OMe-A at position 19 of the sense strand, caused similar PCSK9 suppression at all post-dose timepoints (FIG. 10B). All siRNAs included in this study showed detectable liver siRNA and Liver RISC loading on day 77 post-dose (FIG. 10C).

[1560] The siRNAs D4, D19, D49, and D50 were administered via a single 3 mg/kg subcutaneous injection to B6-huPCSK9-UTR mice. As observed in another study (see FIG. 5A), D19 administration suppressed plasma PCSK9 more durably compared to D4 (FIG. 11A). D49 and D50 administration suppressed plasma PCSK9 more durably compared to D4, and similarly to D19 at all post-dose timepoints (FIG. 11A). Consistent with the greater plasma PCSK9 suppression observed on day 77 post-dose for D19, D49, and D50 compared to D4 (FIG. 11A), D19, D49, and D50 suppressed liver PCSK9 mRNA on day 77 post-dose to a greater extent than D4 (FIG. 11B). Liver siRNA level on day 77 post-dose was higher for D19, D49, and D50 compared to D4 (FIG. 11B). Liver RISC loading on day 77 post-dose was higher for D49 and D50 compared to D4 and D19 (FIG. 11B).

[1561] The siRNAs D7, D8, D51, D52, D53, and D54 were administered to B6-huPCSK9-UTR mice as a single subcutaneous injection at the following dose levels: 3 mg/kg for all siRNAs, also at 6 mg/kg for D7, D8, and D54, and also at 1 mg/kg for D54. The effects of siRNA administration on plasma PCSK9 levels at up to 77 days post-dose are shown in FIG. 12A; for clarity, subsets of this data are replotted in FIG. 12B. At a dose level of 3 mg/kg, plasma PCSK9 suppression was more durable for D8 compared to D7, and greater plasma PCSK9 suppression was seen at all post-dose timepoints for D51, D52, D53, and D54 compared to D8 (FIG. 12B). D7, D8, and D54, for which more than one dose level was evaluated in this study, showed dose-dependent plasma PCSK9 suppression (FIG. 12B). The magnitude of plasma PCSK9 suppression at the first post-dose timepoint (day 9) is shown for each siRNA and dose level in Table 11; at the 3 mg/kg dose level, D52 and D54 had the greatest plasma PCSK9 suppression on day 9 post-dose (91.2% and 92.6%, respectively). At day 77 post-dose, for the 3 mg/kg dose level, liver PCSK9 mRNA suppression by D8, D51, D52, D53, and D54 was greater compared to D7, for which the liver PCSK9 mRNA level was equivalent to that of vehicle-treated mice (vehicle: PBS, phosphate-buffered saline) (FIG. 12C). The liver siRNA level on day 77 post-dose for the 3 mg/kg dose level was lowest for D7, intermediate for D8, and highest for D51, D52, D53, and D54 (FIG. 12C). The liver RISC loading level on day 77 post-dose for the 3 mg/kg dose level was lowest for D7, higher for D8, still higher for D51 and D53, and highest for D52 and D54.

TABLE 11

| | | % Change from baseline in |
|---|---|---|
| | | plasma PCSK9 at first post- |
| | Dose | dose timepoint (day 9) |
| siRNA | (mg/kg) | (mean ± standard deviation) |
| D 7 | 3 | −78.0 ± 2.4 (n = 4) |
| D 7 | 6 | −89.0 ± 3.7 (n = 4) |
| D 8 | 3 | −76.7 ± 4.7 (n = 4) |
| D 8 | 6 | −86.4 ± 3.7 (n = 4) |
| D 51 | 3 | −84.3 ± 2.1 (n = 4) |
| D 52 | 3 | −91.2 ± 5.6 (n = 4) |
| D 53 | 3 | −84.5 ± 3.2 (n = 4) |
| D 54 | 1 | −71.9 ± 7.0 (n = 4) |
| D 54 | 3 | −92.6 ± 3.2 (n = 4) |
| D 54 | 6 | −95.5 ± 1.2 (n = 4) |

[1562] The siRNAs D38, D42, D43, D44, D55, D56, D57, D58, and D59 were administered to B6-huPCSK9-UTR mice as a single 3 mg/kg subcutaneous injection. The effects of siRNA administration on plasma PCSK9 monitored at timepoints up to day 77 post-dose are shown in FIG. 13A; for clarity, subsets of these data are replotted in FIG. 13B. Compared to D38, D55, which is an analog of D38 with a TNA nucleotide at position 3 of the antisense strand, had a similar effect on plasma PCSK9 levels over time (FIG. 13B). Compared to D38, analogs D42, D43, and D44, which have a TNA nucleotide in position 5, 6, or 7, respectively, of the antisense strand, had slightly less potent and/or durable suppression of plasma PCSK9 over the course of the study. Compared to D38, the analogs D56, D57, and D58 with TNA nucleotides in position 3 of the antisense strand and in position 5, 6, or 7, respectively, of the antisense strand, had similarly potent plasma PCSK9 suppression at the first post-dose timepoint (day 8 post-dose) and had durability of plasma PCSK9 suppression over the course of the study that was slightly lower (for D56) or similar (for D57 and D58) (FIG. 13B). The effects of all siRNAs in this study on liver PCSK9 mRNA level, liver siRNA concentration, and liver RISC loading on day 77 post-dose are shown in FIG. 13C.

[1563] The siRNAs D7 and D52 were administered as a single subcutaneous injection to B6-huPCSK9-UTR mice at a dose level of 0.3, 1, or 3 mg/kg. Both siRNAs dose-dependently suppressed plasma PCSK9 (FIG. 14A). At each dose level, plasma PCSK9 suppression at the first post-dose timepoint (day 10) was greater for D52 compared to D7 (FIG. 14A, Table 12). In addition, plasma PCSK9 suppression over time was more durable at each dose level for D52 compared to D7. These results indicate that D52 has higher in vivo potency and durability of action compared to D7. Consistent with the plasma PCSK9 results, on day 77 post-dose D52 at the 3 mg/kg dose level suppressed liver PCSK9 mRNA to a greater extent than D7 at the 3 mg/kg dose level (FIG. 14B). On day 77 post-dose, D52 at the 3 mg/kg dose level had higher liver siRNA concentration and higher liver RISC loading compared to D7 at the 3 mg/kg dose level (FIG. 14B).

TABLE 12

| | | % Change from baseline in |
|---|---|---|
| | | plasma PCSK9 at first post- |
| | Dose | dose timepoint (day 10) |
| siRNA | (mg/kg) | (mean ±/− standard deviation) |
| D 7 | 0.3 | −13.5 ± 6.8 (n = 4) |
| D 7 | 1 | −57.5 ± 5.6 (n = 4) |
| D 7 | 3 | −73.1 ± 9.4 (n = 4) |
| D 52 | 0.3 | −53.4 ± 2.4 (n = 4) |
| D 52 | 1 | −77.3 ± 3.1 (n = 4) |
| D 52 | 3 | −93.3 ± 2.2 (n = 4) |

[1564] The siRNAs D52, D60, D61, and D62 were administered via a single 3 mg/kg subcutaneous injection to B6-huPCSK9-UTR mice. At all post-dose timepoints, D61 suppressed plasma PCSK9 to the same extent as D52; in contrast D60 and D62 suppressed plasma PCSK9 between day 21 and day 77 to a lesser extent compared to D52 (FIG. 15A). On day 77 post-dose, liver siRNA concentrations and liver RISC loading levels were similar for D52 and D61 and lower for D60 and D62 (FIG. 15B).

[1565] The siRNAs D8 and D63 were administered via a single 3 mg/kg subcutaneous injection to B6-huPCSK9-UTR mice. At all post-dose timepoints, D63 suppressed plasma PCSK9 to a similar extent as D8 (FIG. 16).

### Example 5. In Vitro Dose-Dependent Profiling in Hep3B Cells

[1566] Hep3B cells (ATCC. Cat. HB-8064) were cultured in EMEM with L-Glut (ATCC 30-2003)+10% FBS medium (heat inactivated). Cells were seeded in a 96-well plate and reverse transfected with siRNA D7, D8, or D52 using RNAiMax (Thermofisher cat. 13778150) in an 8-point dose response starting with 5 nM siRNA using a 1:4 dilution factor. Remaining PCSK9 mRNA levels were measured 24 hr post transfection by qPCR using PCSK9 and PGK1 taqman assays. The degree of knock-down was calculated using the delta delta CT method. Degree of knock-down vs. siRNA concentration data was used to determine the IC50 and maximum inhibition (%).

[1567] Dose response curves for D7, D8, and D52 are shown in FIG. 17 and IC50 and maximum inhibition values are shown in Table 13. All 3 siRNAs had similar maximum PCSK9 mRNA inhibition (Table 13). Compared to D7, the IC50 values for D8 and D52 were 1.4-fold lower and 7.2-fold lower, respectively. These results indicate that D52 has significantly higher in vitro potency compared to D7 and D8.

TABLE 13

| siRNA | IC50 (nM) | Max inhibition (%) |
|---|---|---|
| D 7 | 0.00818 | 79.22 |
| D 8 | 0.00568 | 79.35 |
| D 52 | 0.00113 | 80.15 |

### Example 6. Specificity Profiling in Hep3B Cells

[1568] Hep3B cells (ATCC. Cat. HB-8064) were cultured in EMEM with L-Glut (ATCC 30-2003)+10% FBS medium (ATCC. Cat. 30-2020). Cells were seeded in a 96-well plate and reverse transfected with an siRNA concentration of 20 nM, 5 nM or 0.5 nM for D52, D60, D61 or D62 using RNAiMax (Thermofisher cat. 13778150). Cells are harvested, lysed and total RNA is extracted using MagMAX™-96 Total RNA Isolation Kit (Thermofisher Cat. AM1830) 24 hrs post transfection. Transcriptome-wide changes of cells treated with siRNA were characterized using a high-throughput 3′mRNA sequencing technology relative to cells treated with vehicle control (PBS+RNAiMax). Differential gene expression is displayed using MA-plots for each siRNA (i.e. D52, D60, D61, D62) at a given concentration, highlighting the on-target knockdown for PCSK9 (FIG. 18).

### Example 7. In Vivo Profiling in Cynomolgus Monkeys

[1569] The siRNAs D8, D51, D52, D53, and D54 were administered to obese cynomolgus monkeys (n=5 for each siRNA) via a single 3 mg/kg subcutaneous injection. Group mean plasma siRNA concentrations measured by liquid chromatography mass spectrometry (LC-MS) at 2, 4, and 24 hr post-dose are listed in Table 14; note that one monkey in the D54 group had undetectable plasma siRNA concentration at all three timepoints and was therefore excluded from the group mean plasma siRNA calculation and from group mean plasma PCSK9 and serum LDL-C calculations. PCSK9 protein concentrations in plasma samples were determined using a human PCSK9 ELISA kit from R&D Systems (catalog no. SPC900) with purified, recombinant cynomolgus monkey PCSK9 (prepared at Novartis; stock solution concentration 0.9 mg/mL) used as the standard. Plasma PCSK9 concentrations and serum LDL-C concentrations were monitored at several pre-dose timepoints and at post-dose timepoints up to 140 days post-dose (FIG. 19). All of the siRNAs in this study suppressed plasma PCSK9 and serum LDL-C levels relative to baseline values, with group mean plasma PCSK9 and serum LDL-C nadirs occurring on days 14-28 post-dose (FIG. 19, Table 15) followed by a gradual return to baseline levels (FIG. 19). Compared to D8, D52 had greater maximal plasma PCSK9 lowering (76.20 vs. 62.2%) and greater maximal LDL-C lowering (62.2% vs. 53.5%) (Table 15). D52 also reduced serum LDL-C to a greater extent than D8 at multiple timepoints after its LDL-C lowering nadir on day 28; for example, on day 70 post-dose, serum LDL-C was lowered by 39.6 h and 11.5 for D52 and D8, respectively (FIG. 19B).

TABLE 14

Plasma siRNA concentration (ng/mL, group
mean ± standard deviation)

| | 2 hr | 4 hr | 24 hr |
|---|---|---|---|
| siRNA | post-dose | post-dose | post-dose |
| D 8 (n = 5) | 2036 ± 561 | 1681 ± 498 | 12 ± 12 |
| D 51 (n = 5) | 1189 ± 383 | 1042 ± 335 | 6 ± 1 |
| D 52 (n = 5) | 2054 ± 565 | 1548 ± 481 | 5 ± 1 |
| D 53 (n = 5) | 1506 ± 586 | 1245 ± 628 | 6 ± 2 |
| D 54 (n = 4) | 1971 ± 1111 | 1283 ± 308 | 5 ± 2 |

TABLE 15

| | Maximal plasma PCSK9 | Maximal serum LDL-C |
|---|---|---|
| siRNA | % change from baseline | % change from baseline |
| D 8 | −62.2 ± 17.3 (on day 28), n = 5 | −53.5 ± 9.0 (on day 14), n = 5 |
| D 51 | −67.0 ± 5.7 (on day 28), n = 5 | −48.8 ± 9.6 (on day 14), n = 5 |
| D 52 | −76.2 ± 12.3 (on day 28), n = 5 | −62.2 ± 11.5 (on day 28), n = 4 |
| D 53 | −47.2 ± 15.5 (on day 14), n = 5 | −49.3 ± 12.3 (on day 21), n = 5 |
| D 54 | −55.5 ± 23.7 (on day 14), n = 4 | −58.8 ± 14.5 (on day 28), n = 4 |

The application's sequence listing, which the Patent Office published only in electronic form, follows.

SEQUENCE LISTING (1036 sequences)

SEQ ID NO: 1 - RNA, 3731 nt, Homo sapiens
  source 1..3731: mol_type = genomic RNA
gtccgatggggctctggtggcgtgatctgcgcgccccaggcgtcaagcacccacaccctagaaggtttccgcagcgacgtcgaggcgctcatggttgcaggcgggcgccgccgttcagttcagggtctgagcctggaggagtgagccaggcagtgagactggctcgggcgggccgggacgcgtcgttgcagcagcggctcccagctcccagccaggattccgcgcgccccttcacgcgccctgctcctgaacttcagctcctgcacagtcctccccaccgcaaggctcaaggcgccgccggcgtggaccgcgcacggcctctaggtctcctcgccaggacagcaacctctcccctggccctcatgggcaccgtcagctccaggcggtcctggtggccgctgccactgctgctgctgctgctgctgctcctgggtcccgcgggcgcccgtgcgcaggaggacgaggacggcgactacgaggagctggtgctagccttgcgttccgaggaggacggcctggccgaagcacccgagcacggaaccacagccaccttccaccgctgcgccaaggatccgtggaggttgcctggcacctacgtggtggtgctgaaggaggagacccacctctcgcagtcagagcgcactgcccgccgcctgcaggcccaggctgcccgccggggatacctcaccaagatcctgcatgtcttccatggccttcttcctggcttcctggtgaagatgagtggcgacctgctggagctggccttgaagttgccccatgtcgactacatcgaggaggactcctctgtctttgcccagagcatcccgtggaacctggagcggattacccctccacggtaccgggcggatgaataccagccccccgacggaggcagcctggtggaggtgtatctcctagacaccagcatacagagtgaccaccgggaaatcgagggcagggtcatggtcaccgacttcgagaatgtgcccgaggaggacgggacccgcttccacagacaggccagcaagtgtgacagtcatggcacccacctggcaggggtggtcagcggccgggatgccggcgtggccaagggtgccagcatgcgcagcctgcgcgtgctcaactgccaagggaagggcacggttagcggcaccctcataggcctggagtttattcggaaaagccagctggtccagcctgtggggccactggtggtgctgctgcccctggcgggtgggtacagccgcgtcctcaacgccgcctgccagcgcctggcgagggctggggtcgtgctggtcaccgctgccggcaacttccgggacgatgcctgcctctactccccagcctcagctcccgaggtcatcacagttggggccaccaatgcccaagaccagccggtgaccctggggactttggggaccaactttggccgctgtgtggacctctttgccccaggggaggacatcattggtgcctccagcgactgcagcacctgctttgtgtcacagagtgggacatcacaggctgctgcccacgtggctggcattgcagccatgatgctgtctgccgagccggagctcaccctggccgagttgaggcagagactgatccacttctctgccaaagatgtcatcaatgaggcctggttccctgaggaccagcgggtactgacccccaacctggtggccgccctgccccccagcacccatggggcaggttggcagctgttttgcaggactgtatggtcagcacactcggggcctacacggatggccacagccgtcgcccgctgcgccccagatgaggagctgctgagctgctccagtttctccaggagtgggaagcggcggggcgagcgcatggaggcccaagggggcaagctggtctgccgggcccacaacgcttttgggggtgagggtgtctacgccattgccaggtgctgcctgctaccccaggccaactgcagcgtccacacagctccaccagctgaggccagcatggggacccgtgtccactgccaccaacagggccacgtcctcacaggctgcagctcccactgggaggtggaggaccttggcacccacaagccgcctgtgctgaggccacgaggtcagcccaaccagtgcgtgggccacagggaggccagcatccacgcttcctgctgccatgccccaggtctggaatgcaaagtcaaggagcatggaatcccggcccctcaggagcaggtgaccgtggcctgcgaggagggctggaccctgactggctgcagtgccctccctgggacctcccacgtcctgggggcctacgccgtagacaacacgtgtgtagtcaggagccgggacgtcagcactacaggcagcaccagcgaaggggccgtgacagccgttgccatctgctgccggagccggcacctggcgcaggcctcccaggagctccagtgacagccccatcccaggatgggtgtctggggagggtcaagggctggggctgagctttaaaatggttccgacttgtccctctctcagccctccatggcctggcacgaggggatggggatgcttccgcctttccggggctgctggcctggcccttgagtggggcagcctccttgcctggaactcactcactctgggtgcctcctccccaggtggaggtgccaggaagctccctccctcactgtggggcatttcaccattcaaacaggtcgagctgtgctcgggtgctgccagctgctcccaatgtgccgatgtccgtgggcagaatgacttttattgagctcttgttccgtgccaggcattcaatcctcaggtctccaccaaggaggcaggattcttcccatggataggggagggggcggtaggggctgcagggacaaacatcgttggggggtgagtgtgaaaggtgctgatggccctcatctccagctaactgtggagaagcccctgggggctccctgattaatggaggcttagctttctggatggcatctagccagaggctggagacaggtgcgcccctggtggtcacaggctgtgccttggtttcctgagccacctttactctgctctatgccaggctgtgctagcaacacccaaaggtggcctgcggggagccatcacctaggactgactcggcagtgtgcagtggtgcatgcactgtctcagccaacccgctccactacccggcagggtacacattcgcacccctacttcacagaggaagaaacctggaaccagagggggcgtgcctgccaagctcacacagcaggaactgagccagaaacgcagattgggctggctctgaagccaagcctcttcttacttcacccggctgggctcctcatttttacgggtaacagtgaggctgggaaggggaacacagaccaggaagctcggtgagtgatggcagaacgatgcctgcaggcatggaactttttccgttatcacccaggcctgattcactggcctggcggagatgcttctaaggcatggtcgggggagagggccaacaactgtccctccttgagcaccagccccacccaagcaagcagacatttatcttttgggtctgtcctctctgttgcctttttacagccaacttttctagacctgttttgcttttgtaacttgaagatatttattctgggttttgtagcatttttattaatatggtgactttttaaaataaaaacaaacaaacgttgtcctaacaaaaaaaaaaaaaaaaaaaaa

SEQ ID NO: 2 - RNA, 3637 nt, Homo sapiens
  source 1..3637: mol_type = genomic RNA
agcgacgtcgaggcgctcatggttgcaggcgggcgccgccgttcagttcagggtctgagcctggaggagtgagccaggcagtgagactggctcgggcgggccgggacgcgtcgttgcagcagcggctcccagctcccagccaggattccgcgcgccccttcacgcgccctgctcctgaacttcagctcctgcacagtcctccccaccgcaaggctcaaggcgccgccggcgtggaccgcgcacggcctctaggtctcctcgccaggacagcaacctctcccctggccctcatgggcaccgtcagctccaggcggtcctggtggccgctgccactgctgctgctgctgctgctgctcctgggtcccgcgggcgcccgtgcgcaggaggacgaggacggcgactacgaggagctggtgctagccttgcgttccgaggaggacggcctggccgaagcacccgagcacggaaccacagccaccttccaccgctgcgccaaggatccgtggaggttgcctggcacctacgtggtggtgctgaaggaggagacccacctctcgcagtcagagcgcactgcccgccgcctgcaggcccaggctgcccgccggggatacctcaccaagatcctgcatgtcttccatggccttcttcctggcttcctggtgaagatgagtggcgacctgctggagctggccttgaagttgccccatgtcgactacatcgaggaggactcctctgtctttgcccagagcatcccgtggaacctggagcggattacccctccacggtaccgggcggatgaataccagccccccgacggaggcagcctggtggaggtgtatctcctagacaccagcatacagagtgaccaccgggaaatcgagggcagggtcatggtcaccgacttcgagaatgtgcccgaggaggacgggacccgcttccacagacaggccagcaagtgtgacagtcatggcacccacctggcaggggtggtcagcggccgggatgccggcgtggccaagggtgccagcatgcgcagcctgcgcgtgctcaactgccaagggaagggcacggttagcggcaccctcataggcctggagtttattcggaaaagccagctggtccagcctgtggggccactggtggtgctgctgcccctggcgggtgggtacagccgcgtcctcaacgccgcctgccagcgcctggcgagggctggggtcgtgctggtcaccgctgccggcaacttccgggacgatgcctgcctctactccccagcctcagctcccgaggtcatcacagttggggccaccaatgcccaagaccagccggtgaccctggggactttggggaccaactttggccgctgtgtggacctctttgccccaggggaggacatcattggtgcctccagcgactgcagcacctgctttgtgtcacagagtgggacatcacaggctgctgcccacgtggctggcattgcagccatgatgctgtctgccgagccggagctcaccctggccgagttgaggcagagactgatccacttctctgccaaagatgtcatcaatgaggcctggttccctgaggaccagcgggtactgacccccaacctggtggccgccctgccccccagcacccatggggcaggttggcagctgttttgcaggactgtatggtcagcacactcggggcctacacggatggccacagccgtcgcccgctgcgccccagatgaggagctgctgagctgctccagtttctccaggagtgggaagcggcggggcgagcgcatggaggcccaagggggcaagctggtctgccgggcccacaacgcttttgggggtgagggtgtctacgccattgccaggtgctgcctgctaccccaggccaactgcagcgtccacacagctccaccagctgaggccagcatggggacccgtgtccactgccaccaacagggccacgtcctcacaggctgcagctcccactgggaggtggaggaccttggcacccacaagccgcctgtgctgaggccacgaggtcagcccaaccagtgcgtgggccacagggaggccagcatccacgcttcctgctgccatgccccaggtctggaatgcaaagtcaaggagcatggaatcccggcccctcaggagcaggtgaccgtggcctgcgaggagggctggaccctgactggctgcagtgccctccctgggacctcccacgtcctgggggcctacgccgtagacaacacgtgtgtagtcaggagccgggacgtcagcactacaggcagcaccagcgaaggggccgtgacagccgttgccatctgctgccggagccggcacctggcgcaggcctcccaggagctccagtgacagccccatcccaggatgggtgtctggggagggtcaagggctggggctgagctttaaaatggttccgacttgtccctctctcagccctccatggcctggcacgaggggatggggatgcttccgcctttccggggctgctggcctggcccttgagtggggcagcctccttgcctggaactcactcactctgggtgcctcctccccaggtggaggtgccaggaagctccctccctcactgtggggcatttcaccattcaaacaggtcgagctgtgctcgggtgctgccagctgctcccaatgtgccgatgtccgtgggcagaatgacttttattgagctcttgttccgtgccaggcattcaatcctcaggtctccaccaaggaggcaggattcttcccatggataggggagggggcggtaggggctgcagggacaaacatcgttggggggtgagtgtgaaaggtgctgatggccctcatctccagctaactgtggagaagcccctgggggctccctgattaatggaggcttagctttctggatggcatctagccagaggctggagacaggtgcgcccctggtggtcacaggctgtgccttggtttcctgagccacctttactctgctctatgccaggctgtgctagcaacacccaaaggtggcctgcggggagccatcacctaggactgactcggcagtgtgcagtggtgcatgcactgtctcagccaacccgctccactacccggcagggtacacattcgcacccctacttcacagaggaagaaacctggaaccagagggggcgtgcctgccaagctcacacagcaggaactgagccagaaacgcagattgggctggctctgaagccaagcctcttcttacttcacccggctgggctcctcatttttacgggtaacagtgaggctgggaaggggaacacagaccaggaagctcggtgagtgatggcagaacgatgcctgcaggcatggaactttttccgttatcacccaggcctgattcactggcctggcggagatgcttctaaggcatggtcgggggagagggccaacaactgtccctccttgagcaccagccccacccaagcaagcagacatttatcttttgggtctgtcctctctgttgcctttttacagccaacttttctagacctgttttgcttttgtaacttgaagatatttattctgggttttgtagcatttttattaatatggtgactttttaaaataaaaacaaacaaacgttgtcctaa

SEQ ID NO: 3 - RNA, 21 nt, synthetic construct
  source 1..21: mol_type = other RNA
gtcgaggcgctcatggttgca

SEQ ID NO: 4 - RNA, 21 nt, synthetic construct
  source 1..21: mol_type = other RNA
gaggcgctcatggttgcagga

SEQ ID NO: 5 - RNA, 21 nt, synthetic construct
  source 1..21: mol_type = other RNA
cgggccgggacgcgtcgttga

SEQ ID NO: 6 - RNA, 21 nt, synthetic construct
  source 1..21: mol_type = other RNA
ccgggacgcgtcgttgcagca

SEQ ID NO: 7 - RNA, 21 nt, synthetic construct
  source 1..21: mol_type = other RNA
ctcccagccaggattccgcga

SEQ ID NO: 8 - RNA, 21 nt, synthetic construct
  source 1..21: mol_type = other RNA
cccagccaggattccgcgcga

SEQ ID NO: 9 - RNA, 21 nt, synthetic construct
  source 1..21: mol_type = other RNA
caggattccgcgcgcccctta

SEQ ID NO: 10 - RNA, 21 nt, synthetic construct
  source 1..21: mol_type = other RNA
ctccccaccgcaaggctcaaa

SEQ ID NO: 11 - RNA, 21 nt, synthetic construct
  source 1..21: mol_type = other RNA
tccccaccgcaaggctcaagg

SEQ ID NO: 12 - RNA, 21 nt, synthetic construct
  source 1..21: mol_type = other RNA
ccgcgcacggcctctaggtct

SEQ ID NO: 13 - RNA, 21 nt, synthetic construct
  source 1..21: mol_type = other RNA
ccgcgcacggcctctaggtca

SEQ ID NO: 14 - RNA, 21 nt, synthetic construct
  source 1..21: mol_type = other RNA
cgcgcacggcctctaggtcta

SEQ ID NO: 15 - RNA, 21 nt, synthetic construct
  source 1..21: mol_type = other RNA
gcacggcctctaggtctccta

SEQ ID NO: 16 - RNA, 21 nt, synthetic construct
  source 1..21: mol_type = other RNA
caccgtcagctccaggcggta

SEQ ID NO: 17 - RNA, 21 nt, synthetic construct
  source 1..21: mol_type = other RNA
accgtcagctccaggcggtcc

SEQ ID NO: 18 - RNA, 21 nt, synthetic construct
  source 1..21: mol_type = other RNA
ccgtcagctccaggcggtcct

SEQ ID NO: 19 - RNA, 21 nt, synthetic construct
  source 1..21: mol_type = other RNA
ccgtcagctccaggcggtcca

SEQ ID NO: 20 - RNA, 21 nt, synthetic construct
  source 1..21: mol_type = other RNA
tgggtcccgcgggcgcccgtg

SEQ ID NO: 21 - RNA, 21 nt, synthetic construct
  source 1..21: mol_type = other RNA
gcgggcgcccgtgcgcaggaa

SEQ ID NO: 22 - RNA, 21 nt, synthetic construct
  source 1..21: mol_type = other RNA
gcccgtgcgcaggaggacgaa

SEQ ID NO: 23 - RNA, 21 nt, synthetic construct
  source 1..21: mol_type = other RNA
cccgtgcgcaggaggacgaga

SEQ ID NO: 24 - RNA, 21 nt, synthetic construct
  source 1..21: mol_type = other RNA
gaggacgaggacggcgactaa

SEQ ID NO: 25 - RNA, 21 nt, synthetic construct
  source 1..21: mol_type = other RNA
ctacgaggagctggtgctaga

SEQ ID NO: 26 - RNA, 21 nt, synthetic construct
  source 1..21: mol_type = other RNA
gaggagctggtgctagcctta

SEQ ID NO: 27 - RNA, 21 nt, synthetic construct
  source 1..21: mol_type = other RNA
gctggtgctagccttgcgtta

SEQ ID NO: 28 - RNA, 21 nt, synthetic construct
  source 1..21: mol_type = other RNA
tggtgctagccttgcgttccg

SEQ ID NO: 29 - RNA, 21 nt, synthetic construct
  source 1..21: mol_type = other RNA
ctagccttgcgttccgaggaa

SEQ ID NO: 30 - RNA, 21 nt, synthetic construct
  source 1..21: mol_type = other RNA
cccgagcacggaaccacagca

SEQ ID NO: 31 - RNA, 21 nt, synthetic construct
  source 1..21: mol_type = other RNA
gagcacggaaccacagccaca

SEQ ID NO: 32 - RNA, 21 nt, synthetic construct
  source 1..21: mol_type = other RNA
cacagccaccttccaccgcta

SEQ ID NO: 33 - RNA, 21 nt, synthetic construct
  source 1..21: mol_type = other RNA
caccttccaccgctgcgccaa

SEQ ID NO: 34 - RNA, 21 nt, synthetic construct
  source 1..21: mol_type = other RNA
accttccaccgctgcgccaag

SEQ ID NO: 35 - RNA, 21 nt, synthetic construct
  source 1..21: mol_type = other RNA
ttccaccgctgcgccaaggat

SEQ ID NO: 36 - RNA, 21 nt, synthetic construct
  source 1..21: mol_type = other RNA
ttccaccgctgcgccaaggaa

SEQ ID NO: 37 - RNA, 21 nt, synthetic construct
  source 1..21: mol_type = other RNA
ccaccgctgcgccaaggatca

SEQ ID NO: 38 - RNA, 21 nt, synthetic construct
  source 1..21: mol_type = other RNA
caccgctgcgccaaggatcca

SEQ ID NO: 39 - RNA, 21 nt, synthetic construct
  source 1..21: mol_type = other RNA
ccgctgcgccaaggatccgta

SEQ ID NO: 40 - RNA, 21 nt, synthetic construct
  source 1..21: mol_type = other RNA
cgctgcgccaaggatccgtga

SEQ ID NO: 41 - RNA, 21 nt, synthetic construct
  source 1..21: mol_type = other RNA
acctacgtggtggtgctgaag

SEQ ID NO: 42 - RNA, 21 nt, synthetic construct
  source 1..21: mol_type = other RNA
acctctcgcagtcagagcgca

SEQ ID NO: 43 - RNA, 21 nt, synthetic construct
  source 1..21: mol_type = other RNA
cctctcgcagtcagagcgcaa

SEQ ID NO: 44 - RNA, 21 nt, synthetic construct
  source 1..21: mol_type = other RNA
tctcgcagtcagagcgcactg

SEQ ID NO: 45 - RNA, 21 nt, synthetic construct
  source 1..21: mol_type = other RNA
caggctgcccgccggggataa

SEQ ID NO: 46 - RNA, 21 nt, synthetic construct
  source 1..21: mol_type = other RNA
ggctgcccgccggggatacct

SEQ ID NO: 47 - RNA, 21 nt, synthetic construct
  source 1..21: mol_type = other RNA
ggctgcccgccggggatacca

SEQ ID NO: 48 - RNA, 21 nt, synthetic construct
  source 1..21: mol_type = other RNA
tgcccgccggggatacctcac

SEQ ID NO: 49 - RNA, 21 nt, synthetic construct
  source 1..21: mol_type = other RNA
cgccggggatacctcaccaaa

SEQ ID NO: 50 - RNA, 21 nt, synthetic construct
  source 1..21: mol_type = other RNA
gccggggatacctcaccaaga

SEQ ID NO: 51 - RNA, 21 nt, synthetic construct
  source 1..21: mol_type = other RNA
cggggatacctcaccaagata

SEQ ID NO: 52 - RNA, 21 nt, synthetic construct
  source 1..21: mol_type = other RNA
ggggatacctcaccaagatca

SEQ ID NO: 53 - RNA, 21 nt, synthetic construct
  source 1..21: mol_type = other RNA
cctggcttcctggtgaagata

SEQ ID NO: 54 - RNA, 21 nt, synthetic construct
  source 1..21: mol_type = other RNA
gtgaagatgagtggcgaccta

SEQ ID NO: 55 - RNA, 21 nt, synthetic construct
  source 1..21: mol_type = other RNA
aagatgagtggcgacctgctg

SEQ ID NO: 56 - RNA, 21 nt, synthetic construct
  source 1..21: mol_type = other RNA
ggccttgaagttgccccatgt

SEQ ID NO: 57 - RNA, 21 nt, synthetic construct
  source 1..21: mol_type = other RNA
ggccttgaagttgccccatga

SEQ ID NO: 58 - RNA, 21 nt, synthetic construct
  source 1..21: mol_type = other RNA
ccttgaagttgccccatgtca

SEQ ID NO: 59 - RNA, 21 nt, synthetic construct
  source 1..21: mol_type = other RNA
cttgaagttgccccatgtcga

SEQ ID NO: 60 - RNA, 21 nt, synthetic construct
  source 1..21: mol_type = other RNA
ttgaagttgccccatgtcgac

SEQ ID NO: 61 - RNA, 21 nt, synthetic construct
  source 1..21: mol_type = other RNA
tgaagttgccccatgtcgact

SEQ ID NO: 62 - RNA, 21 nt, synthetic construct
  source 1..21: mol_type = other RNA
tgaagttgccccatgtcgaca

SEQ ID NO: 63 - RNA, 21 nt, synthetic construct
  source 1..21: mol_type = other RNA
gaagttgccccatgtcgacta

SEQ ID NO: 64 - RNA, 21 nt, synthetic construct
  source 1..21: mol_type = other RNA
aagttgccccatgtcgactac

SEQ ID NO: 65 - RNA, 21 nt, synthetic construct
  source 1..21: mol_type = other RNA
agttgccccatgtcgactaca

SEQ ID NO: 66 - RNA, 21 nt, synthetic construct
  source 1..21: mol_type = other RNA
gttgccccatgtcgactacat

SEQ ID NO: 67 - RNA, 21 nt, synthetic construct
  source 1..21: mol_type = other RNA
gttgccccatgtcgactacaa

SEQ ID NO: 68 - RNA, 21 nt, synthetic construct
  source 1..21: mol_type = other RNA
tgccccatgtcgactacatcg

SEQ ID NO: 69 - RNA, 21 nt, synthetic construct
  source 1..21: mol_type = other RNA
gccccatgtcgactacatcga

SEQ ID NO: 70 - RNA, 21 nt, synthetic construct
  source 1..21: mol_type = other RNA
ccccatgtcgactacatcgaa

SEQ ID NO: 71 - RNA, 21 nt, synthetic construct
  source 1..21: mol_type = other RNA
catgtcgactacatcgaggaa

SEQ ID NO: 72 - RNA, 21 nt, synthetic construct
  source 1..21: mol_type = other RNA
atgtcgactacatcgaggagg

SEQ ID NO: 73 - RNA, 21 nt, synthetic construct
  source 1..21: mol_type = other RNA
gtcgactacatcgaggaggaa

SEQ ID NO: 74 - RNA, 21 nt, synthetic construct
  source 1..21: mol_type = other RNA
gactacatcgaggaggactca

SEQ ID NO: 75 - RNA, 21 nt, synthetic construct
  source 1..21: mol_type = other RNA
atcccgtggaacctggagcgg

SEQ ID NO: 76 - RNA, 21 nt, synthetic construct
  source 1..21: mol_type = other RNA
acccctccacggtaccgggcg

SEQ ID NO: 77 - RNA, 21 nt, synthetic construct
  source 1..21: mol_type = other RNA
cccctccacggtaccgggcga

SEQ ID NO: 78 - RNA, 21 nt, synthetic construct
  source 1..21: mol_type = other RNA
ccctccacggtaccgggcgga

SEQ ID NO: 79 - RNA, 21 nt, synthetic construct
  source 1..21: mol_type = other RNA
ctccacggtaccgggcggata

SEQ ID NO: 80 - RNA, 21 nt, synthetic construct
  source 1..21: mol_type = other RNA
tccacggtaccgggcggatga

SEQ ID NO: 81 - RNA, 21 nt, synthetic construct
  source 1..21: mol_type = other RNA
ccacggtaccgggcggatgaa

SEQ ID NO: 82 - RNA, 21 nt, synthetic construct
  source 1..21: mol_type = other RNA
cacggtaccgggcggatgaat

SEQ ID NO: 83 - RNA, 21 nt, synthetic construct
  source 1..21: mol_type = other RNA
cacggtaccgggcggatgaaa

SEQ ID NO: 84 - RNA, 21 nt, synthetic construct
  source 1..21: mol_type = other RNA
acggtaccgggcggatgaata

SEQ ID NO: 85 - RNA, 21 nt, synthetic construct
  source 1..21: mol_type = other RNA
taccgggcggatgaataccag

SEQ ID NO: 86 - RNA, 21 nt, synthetic construct
  source 1..21: mol_type = other RNA
gcagcctggtggaggtgtata

SEQ ID NO: 87 - RNA, 21 nt, synthetic construct
  source 1..21: mol_type = other RNA
gcctggtggaggtgtatctca

SEQ ID NO: 88 - RNA, 21 nt, synthetic construct
  source 1..21: mol_type = other RNA
ggtggaggtgtatctcctaga

SEQ ID NO: 89 - RNA, 21 nt, synthetic construct
  source 1..21: mol_type = other RNA
gtggaggtgtatctcctagaa

SEQ ID NO: 90 - RNA, 21 nt, synthetic construct
  source 1..21: mol_type = other RNA
ggaggtgtatctcctagacaa

SEQ ID NO: 91 - RNA, 21 nt, synthetic construct
  source 1..21: mol_type = other RNA
gaggtgtatctcctagacaca

SEQ ID NO: 92 - RNA, 21 nt, synthetic construct
  source 1..21: mol_type = other RNA
aggtgtatctcctagacacca

SEQ ID NO: 93 - RNA, 21 nt, synthetic construct
  source 1..21: mol_type = other RNA
ggtgtatctcctagacaccaa

SEQ ID NO: 94 - RNA, 21 nt, synthetic construct
  source 1..21: mol_type = other RNA
gtatctcctagacaccagcat

SEQ ID NO: 95 - RNA, 21 nt, synthetic construct
  source 1..21: mol_type = other RNA
gtatctcctagacaccagcaa

SEQ ID NO: 96 - RNA, 21 nt, synthetic construct
  source 1..21: mol_type = other RNA
tatctcctagacaccagcata

SEQ ID NO: 97 - RNA, 21 nt, synthetic construct
  source 1..21: mol_type = other RNA
atctcctagacaccagcatac

SEQ ID NO: 98 - RNA, 21 nt, synthetic construct
  source 1..21: mol_type = other RNA
cctagacaccagcatacagaa

SEQ ID NO: 99 - RNA, 21 nt, synthetic construct
  source 1..21: mol_type = other RNA
caccagcatacagagtgacca

SEQ ID NO: 100 - RNA, 21 nt, synthetic construct
  source 1..21: mol_type = other RNA
ccagcatacagagtgaccaca

SEQ ID NO: 101 - RNA, 21 nt, synthetic construct
  source 1..21: mol_type = other RNA
gcatacagagtgaccaccgga

SEQ ID NO: 102 - RNA, 21 nt, synthetic construct
  source 1..21: mol_type = other RNA
atacagagtgaccaccgggaa

SEQ ID NO: 103 - RNA, 21 nt, synthetic construct
  source 1..21: mol_type = other RNA
tacagagtgaccaccgggaaa

SEQ ID NO: 104 - RNA, 21 nt, synthetic construct
  source 1..21: mol_type = other RNA
cagagtgaccaccgggaaata

SEQ ID NO: 105 - RNA, 21 nt, synthetic construct
  source 1..21: mol_type = other RNA
agagtgaccaccgggaaatcg

SEQ ID NO: 106 - RNA, 21 nt, synthetic construct
  source 1..21: mol_type = other RNA
gagtgaccaccgggaaatcga

SEQ ID NO: 107 - RNA, 21 nt, synthetic construct
  source 1..21: mol_type = other RNA
agtgaccaccgggaaatcgag

SEQ ID NO: 108 - RNA, 21 nt, synthetic construct
  source 1..21: mol_type = other RNA
gtgaccaccgggaaatcgaga

SEQ ID NO: 109 - RNA, 21 nt, synthetic construct
  source 1..21: mol_type = other RNA
tgaccaccgggaaatcgaggg

SEQ ID NO: 110 - RNA, 21 nt, synthetic construct
  source 1..21: mol_type = other RNA
ggaaatcgagggcagggtcat

SEQ ID NO: 111 - RNA, 21 nt, synthetic construct
  source 1..21: mol_type = other RNA
ggaaatcgagggcagggtcaa

SEQ ID NO: 112 - RNA, 21 nt, synthetic construct
  source 1..21: mol_type = other RNA
gaaatcgagggcagggtcata

SEQ ID NO: 113 - RNA, 21 nt, synthetic construct
  source 1..21: mol_type = other RNA
aaatcgagggcagggtcatgg

SEQ ID NO: 114 - RNA, 21 nt, synthetic construct
  source 1..21: mol_type = other RNA
atcgagggcagggtcatggtc

SEQ ID NO: 115 - RNA, 21 nt, synthetic construct
  source 1..21: mol_type = other RNA
agggcagggtcatggtcaccg

SEQ ID NO: 116 - RNA, 21 nt, synthetic construct
  source 1..21: mol_type = other RNA
ggcagggtcatggtcaccgaa

SEQ ID NO: 117 - RNA, 21 nt, synthetic construct
  source 1..21: mol_type = other RNA
gcagggtcatggtcaccgact

SEQ ID NO: 118 - RNA, 21 nt, synthetic construct
  source 1..21: mol_type = other RNA
gcagggtcatggtcaccgaca

SEQ ID NO: 119 - RNA, 21 nt, synthetic construct
  source 1..21: mol_type = other RNA
cagggtcatggtcaccgactt

SEQ ID NO: 120 - RNA, 21 nt, synthetic construct
  source 1..21: mol_type = other RNA
cagggtcatggtcaccgacta

SEQ ID NO: 121 - RNA, 21 nt, synthetic construct
  source 1..21: mol_type = other RNA
acgggacccgcttccacagac

SEQ ID NO: 122 - RNA, 21 nt, synthetic construct
  source 1..21: mol_type = other RNA
cgggacccgcttccacagaca

SEQ ID NO: 123 - RNA, 21 nt, synthetic construct
  source 1..21: mol_type = other RNA
acagacaggccagcaagtgtg

SEQ ID NO: 124 - RNA, 21 nt, synthetic construct
  source 1..21: mol_type = other RNA
gtgtgacagtcatggcaccca

SEQ ID NO: 125 - RNA, 21 nt, synthetic construct
  source 1..21: mol_type = other RNA
cccacctggcaggggtggtca

SEQ ID NO: 126 - RNA, 21 nt, synthetic construct
  source 1..21: mol_type = other RNA
ccacctggcaggggtggtcaa

SEQ ID NO: 127 - RNA, 21 nt, synthetic construct
  source 1..21: mol_type = other RNA
cagcctgcgcgtgctcaacta

SEQ ID NO: 128 - RNA, 21 nt, synthetic construct
  source 1..21: mol_type = other RNA
agcctgcgcgtgctcaactgc

SEQ ID NO: 129 - RNA, 21 nt, synthetic construct
  source 1..21: mol_type = other RNA
tgcgcgtgctcaactgccaag

SEQ ID NO: 130 - RNA, 21 nt, synthetic construct
  source 1..21: mol_type = other RNA
gcgcgtgctcaactgccaaga

SEQ ID NO: 131 - RNA, 21 nt, synthetic construct
  source 1..21: mol_type = other RNA
aactgccaagggaagggcacg

SEQ ID NO: 132 - RNA, 21 nt, synthetic construct
  source 1..21: mol_type = other RNA
actgccaagggaagggcacgg

SEQ ID NO: 133 - RNA, 21 nt, synthetic construct
  source 1..21: mol_type = other RNA
gaagggcacggttagcggcaa

SEQ ID NO: 134 - RNA, 21 nt, synthetic construct
  source 1..21: mol_type = other RNA
aagggcacggttagcggcacc

SEQ ID NO: 135 - RNA, 21 nt, synthetic construct
  source 1..21: mol_type = other RNA
ggcacggttagcggcacccta

SEQ ID NO: 136 - RNA, 21 nt, synthetic construct
  source 1..21: mol_type = other RNA
acggttagcggcaccctcata

SEQ ID NO: 137 - RNA, 21 nt, synthetic construct
  source 1..21: mol_type = other RNA
cggttagcggcaccctcataa

SEQ ID NO: 138 - RNA, 21 nt, synthetic construct
  source 1..21: mol_type = other RNA
ggttagcggcaccctcataga

SEQ ID NO: 139 - RNA, 21 nt, synthetic construct
  source 1..21: mol_type = other RNA
ggcaccctcataggcctggaa

SEQ ID NO: 140 - RNA, 21 nt, synthetic construct
  source 1..21: mol_type = other RNA
caccctcataggcctggagtt

SEQ ID NO: 141 - RNA, 21 nt, synthetic construct
  source 1..21: mol_type = other RNA
accctcataggcctggagttt

SEQ ID NO: 142 - RNA, 21 nt, synthetic construct
  source 1..21: mol_type = other RNA
cctcataggcctggagtttat

SEQ ID NO: 143 - RNA, 21 nt, synthetic construct
  source 1..21: mol_type = other RNA
cctcataggcctggagtttaa

SEQ ID NO: 144 - RNA, 21 nt, synthetic construct
  source 1..21: mol_type = other RNA
ataggcctggagtttattcgg

SEQ ID NO: 145 - RNA, 21 nt, synthetic construct
  source 1..21: mol_type = other RNA
taggcctggagtttattcgga

SEQ ID NO: 146 - RNA, 21 nt, synthetic construct
  source 1..21: mol_type = other RNA
aggcctggagtttattcggaa

SEQ ID NO: 147 - RNA, 21 nt, synthetic construct
  source 1..21: mol_type = other RNA
cctggagtttattcggaaaaa

SEQ ID NO: 148 - RNA, 21 nt, synthetic construct
  source 1..21: mol_type = other RNA
ctggagtttattcggaaaaga

SEQ ID NO: 149 - RNA, 21 nt, synthetic construct
  source 1..21: mol_type = other RNA
tggagtttattcggaaaagcc

SEQ ID NO: 150 - RNA, 21 nt, synthetic construct
  source 1..21: mol_type = other RNA
tttattcggaaaagccagctg

SEQ ID NO: 151 - RNA, 21 nt, synthetic construct
  source 1..21: mol_type = other RNA
gctgcccctggcgggtgggta

SEQ ID NO: 152 - RNA, 21 nt, synthetic construct
  source 1..21: mol_type = other RNA
ctgcccctggcgggtgggtaa

SEQ ID NO: 153 - RNA, 21 nt, synthetic construct
  source 1..21: mol_type = other RNA
tgcccctggcgggtgggtaca

SEQ ID NO: 154 - RNA, 21 nt, synthetic construct
  source 1..21: mol_type = other RNA
tggcgagggctggggtcgtgc

SEQ ID NO: 155 - RNA, 21 nt, synthetic construct
  source 1..21: mol_type = other RNA
ggctggggtcgtgctggtcaa

SEQ ID NO: 156 - RNA, 21 nt, synthetic construct
  source 1..21: mol_type = other RNA
ggtcgtgctggtcaccgctga

SEQ ID NO: 157 - RNA, 21 nt, synthetic construct
  source 1..21: mol_type = other RNA
cgtgctggtcaccgctgccga

SEQ ID NO: 158 - RNA, 21 nt, synthetic construct
  source 1..21: mol_type = other RNA
gtgctggtcaccgctgccgga

SEQ ID NO: 159 - RNA, 21 nt, synthetic construct
  source 1..21: mol_type = other RNA
ctggtcaccgctgccggcaaa

SEQ ID NO: 160 - RNA, 21 nt, synthetic construct
  source 1..21: mol_type = other RNA
caccgctgccggcaacttcca

SEQ ID NO: 161 - RNA, 21 nt, synthetic construct
  source 1..21: mol_type = other RNA
tgccggcaacttccgggacga

SEQ ID NO: 162 - RNA, 21 nt, synthetic construct
  source 1..21: mol_type = other RNA
gccggcaacttccgggacgat

SEQ ID NO: 163 - RNA, 21 nt, synthetic construct
  source 1..21: mol_type = other RNA
gccggcaacttccgggacgaa

SEQ ID NO: 164 - RNA, 21 nt, synthetic construct
  source 1..21: mol_type = other RNA
ccggcaacttccgggacgata

SEQ ID NO: 165 - RNA, 21 nt, synthetic construct
  source 1..21: mol_type = other RNA
cggcaacttccgggacgatga

SEQ ID NO: 166 - RNA, 21 nt, synthetic construct
  source 1..21: mol_type = other RNA
ggcaacttccgggacgatgca

SEQ ID NO: 167 - RNA, 21 nt, synthetic construct
  source 1..21: mol_type = other RNA
gcaacttccgggacgatgcct

SEQ ID NO: 168 - RNA, 21 nt, synthetic construct
  source 1..21: mol_type = other RNA
gcaacttccgggacgatgcca

SEQ ID NO: 169 - RNA, 21 nt, synthetic construct
  source 1..21: mol_type = other RNA
caacttccgggacgatgccta

SEQ ID NO: 170 - RNA, 21 nt, synthetic construct
  source 1..21: mol_type = other RNA
acttccgggacgatgcctgcc

SEQ ID NO: 171 - RNA, 21 nt, synthetic construct
  source 1..21: mol_type = other RNA
gcctcagctcccgaggtcata

SEQ ID NO: 172 - RNA, 21 nt, synthetic construct
  source 1..21: mol_type = other RNA
cctcagctcccgaggtcatca

SEQ ID NO: 173 - RNA, 21 nt, synthetic construct
  source 1..21: mol_type = other RNA
cagctcccgaggtcatcacaa

SEQ ID NO: 174 - RNA, 21 nt, synthetic construct
  source 1..21: mol_type = other RNA
ctcccgaggtcatcacagtta

SEQ ID NO: 175 - RNA, 21 nt, synthetic construct
  source 1..21: mol_type = other RNA
tcatcacagttggggccacca

SEQ ID NO: 176 - RNA, 21 nt, synthetic construct
  source 1..21: mol_type = other RNA
catcacagttggggccaccaa

SEQ ID NO: 177 - RNA, 21 nt, synthetic construct
  source 1..21: mol_type = other RNA
ggggactttggggaccaactt

SEQ ID NO: 178 - RNA, 21 nt, synthetic construct
  source 1..21: mol_type = other RNA
ggggactttggggaccaacta

SEQ ID NO: 179 - RNA, 21 nt, synthetic construct
  source 1..21: mol_type = other RNA
gggactttggggaccaacttt

SEQ ID NO: 180 - RNA, 21 nt, synthetic construct
  source 1..21: mol_type = other RNA
gggactttggggaccaactta

SEQ ID NO: 181 - RNA, 21 nt, synthetic construct
  source 1..21: mol_type = other RNA
gactttggggaccaactttga

SEQ ID NO: 182 - RNA, 21 nt, synthetic construct
  source 1..21: mol_type = other RNA
ctttggggaccaactttggca

SEQ ID NO: 183 - RNA, 21 nt, synthetic construct
  source 1..21: mol_type = other RNA
ttggggaccaactttggccgc

SEQ ID NO: 184 - RNA, 21 nt, synthetic construct
  source 1..21: mol_type = other RNA
ggaccaactttggccgctgta

SEQ ID NO: 185 - RNA, 21 nt, synthetic construct
  source 1..21: mol_type = other RNA
accaactttggccgctgtgtg

SEQ ID NO: 186 - RNA, 21 nt, synthetic construct
  source 1..21: mol_type = other RNA
ggccgctgtgtggacctcttt

SEQ ID NO: 187 - RNA, 21 nt, synthetic construct
  source 1..21: mol_type = other RNA
ggccgctgtgtggacctctta

SEQ ID NO: 188 - RNA, 21 nt, synthetic construct
  source 1..21: mol_type = other RNA
ccgctgtgtggacctctttga

SEQ ID NO: 189 - RNA, 21 nt, synthetic construct
  source 1..21: mol_type = other RNA
cgctgtgtggacctctttgca

SEQ ID NO: 190 - RNA, 21 nt, synthetic construct
  source 1..21: mol_type = other RNA
caggggaggacatcattggta

SEQ ID NO: 191 - RNA, 21 nt, synthetic construct
  source 1..21: mol_type = other RNA
gacatcattggtgcctccaga

SEQ ID NO: 192 - RNA, 21 nt, synthetic construct
  source 1..21: mol_type = other RNA
cattggtgcctccagcgacta

SEQ ID NO: 193 - RNA, 21 nt, synthetic construct
  source 1..21: mol_type = other RNA
gactgcagcacctgctttgta

SEQ ID NO: 194 - RNA, 21 nt, synthetic construct
  source 1..21: mol_type = other RNA
tgcagcacctgctttgtgtca

SEQ ID NO: 195 - RNA, 21 nt, synthetic construct
  source 1..21: mol_type = other RNA
cagcacctgctttgtgtcaca

SEQ ID NO: 196 - RNA, 21 nt, synthetic construct
  source 1..21: mol_type = other RNA
gcccacgtggctggcattgca

SEQ ID NO: 197 - RNA, 21 nt, synthetic construct
  source 1..21: mol_type = other RNA
ctggcattgcagccatgatga

SEQ ID NO: 198 - RNA, 21 nt, synthetic construct
  source 1..21: mol_type = other RNA
tggcattgcagccatgatgct

SEQ ID NO: 199 - RNA, 21 nt, synthetic construct
  source 1..21: mol_type = other RNA
tggcattgcagccatgatgca

SEQ ID NO: 200 - RNA, 21 nt, synthetic construct
  source 1..21: mol_type = other RNA
ttgcagccatgatgctgtctg

SEQ ID NO: 201 - RNA, 21 nt, synthetic construct
  source 1..21: mol_type = other RNA
atgatgctgtctgccgagccg

SEQ ID NO: 202 - RNA, 21 nt, synthetic construct
  source 1..21: mol_type = other RNA
gatgctgtctgccgagccgga

SEQ ID NO: 203 - RNA, 21 nt, synthetic construct
  source 1..21: mol_type = other RNA
atgctgtctgccgagccggag

SEQ ID NO: 204 - RNA, 21 nt, synthetic construct
  source 1..21: mol_type = other RNA
ggagctcaccctggccgagtt

SEQ ID NO: 205 - RNA, 21 nt, synthetic construct
  source 1..21: mol_type = other RNA
ggagctcaccctggccgagta

SEQ ID NO: 206 - RNA, 21 nt, synthetic construct
  source 1..21: mol_type = other RNA
gagctcaccctggccgagtta

SEQ ID NO: 207 - RNA, 21 nt, synthetic construct
  source 1..21: mol_type = other RNA
ctcaccctggccgagttgaga

SEQ ID NO: 208 - RNA, 21 nt, synthetic construct
  source 1..21: mol_type = other RNA
tggccgagttgaggcagagac

SEQ ID NO: 209 - RNA, 21 nt, synthetic construct
  source 1..21: mol_type = other RNA
gagttgaggcagagactgata

SEQ ID NO: 210 - RNA, 21 nt, synthetic construct
  source 1..21: mol_type = other RNA
gcagagactgatccacttcta

SEQ ID NO: 211 - RNA, 21 nt, synthetic construct
  source 1..21: mol_type = other RNA
cagagactgatccacttctct

SEQ ID NO: 212 - RNA, 21 nt, synthetic construct
  source 1..21: mol_type = other RNA
cagagactgatccacttctca

SEQ ID NO: 213 - RNA, 21 nt, synthetic construct
  source 1..21: mol_type = other RNA
agagactgatccacttctctg

SEQ ID NO: 214 - RNA, 21 nt, synthetic construct
  source 1..21: mol_type = other RNA
ttctctgccaaagatgtcatc

SEQ ID NO: 215 - RNA, 21 nt, synthetic construct
  source 1..21: mol_type = other RNA
aaagatgtcatcaatgaggcc

SEQ ID NO: 216 - RNA, 21 nt, synthetic construct
  source 1..21: mol_type = other RNA
gtcatcaatgaggcctggtta

SEQ ID NO: 217 - RNA, 21 nt, synthetic construct
  source 1..21: mol_type = other RNA
tcatcaatgaggcctggttcc

SEQ ID NO: 218 - RNA, 21 nt, synthetic construct
  source 1..21: mol_type = other RNA
cctgaggaccagcgggtacta

SEQ ID NO: 219 - RNA, 21 nt, synthetic construct
  source 1..21: mol_type = other RNA
tgaggaccagcgggtactgac

SEQ ID NO: 220 - RNA, 21 nt, synthetic construct
  source 1..21: mol_type = other RNA
gaggaccagcgggtactgaca

SEQ ID NO: 221 - RNA, 21 nt, synthetic construct
  source 1..21: mol_type = other RNA
ggaccagcgggtactgaccca

SEQ ID NO: 222 - RNA, 21 nt, synthetic construct
  source 1..21: mol_type = other RNA
cagcacactcggggcctacaa

SEQ ID NO: 223 - RNA, 21 nt, synthetic construct
  source 1..21: mol_type = other RNA
agcacactcggggcctacacg

SEQ ID NO: 224 - RNA, 21 nt, synthetic construct
  source 1..21: mol_type = other RNA
gcacactcggggcctacacga

SEQ ID NO: 225 - RNA, 21 nt, synthetic construct
  source 1..21: mol_type = other RNA
cacactcggggcctacacgga

SEQ ID NO: 226 - RNA, 21 nt, synthetic construct
  source 1..21: mol_type = other RNA
acactcggggcctacacggat

SEQ ID NO: 227 - RNA, 21 nt, synthetic construct
  source 1..21: mol_type = other RNA
acactcggggcctacacggaa

SEQ ID NO: 228 - RNA, 21 nt, synthetic construct
  source 1..21: mol_type = other RNA
cactcggggcctacacggata

SEQ ID NO: 229 - RNA, 21 nt, synthetic construct
  source 1..21: mol_type = other RNA
tcggggcctacacggatggcc

SEQ ID NO: 230 - RNA, 21 nt, synthetic construct
  source 1..21: mol_type = other RNA
gcctacacggatggccacaga

SEQ ID NO: 231 - RNA, 21 nt, synthetic construct
  source 1..21: mol_type = other RNA
cctacacggatggccacagca

SEQ ID NO: 232 - RNA, 21 nt, synthetic construct
  source 1..21: mol_type = other RNA
gctgctgagctgctccagttt

SEQ ID NO: 233 - RNA, 21 nt, synthetic construct
  source 1..21: mol_type = other RNA
gctgctgagctgctccagtta

SEQ ID NO: 234 - RNA, 21 nt, synthetic construct
  source 1..21: mol_type = other RNA
gctgagctgctccagtttcta

SEQ ID NO: 235 - RNA, 21 nt, synthetic construct
  source 1..21: mol_type = other RNA
gcgagcgcatggaggcccaaa

SEQ ID NO: 236 - RNA, 21 nt, synthetic construct
  source 1..21: mol_type = other RNA
ggcaagctggtctgccgggca

SEQ ID NO: 237 - RNA, 21 nt, synthetic construct
  source 1..21: mol_type = other RNA
ctggtctgccgggcccacaaa

SEQ ID NO: 238 - RNA, 21 nt, synthetic construct
  source 1..21: mol_type = other RNA
ggtctgccgggcccacaacga

SEQ ID NO: 239 - RNA, 21 nt, synthetic construct
  source 1..21: mol_type = other RNA
gtctgccgggcccacaacgct

SEQ ID NO: 240 - RNA, 21 nt, synthetic construct
  source 1..21: mol_type = other RNA
gtctgccgggcccacaacgca

SEQ ID NO: 241 - RNA, 21 nt, synthetic construct
  source 1..21: mol_type = other RNA
tctgccgggcccacaacgctt

SEQ ID NO: 242 - RNA, 21 nt, synthetic construct
  source 1..21: mol_type = other RNA
tctgccgggcccacaacgcta

SEQ ID NO: 243 - RNA, 21 nt, synthetic construct
  source 1..21: mol_type = other RNA
tgccgggcccacaacgctttt

SEQ ID NO: 244 - RNA, 21 nt, synthetic construct
  source 1..21: mol_type = other RNA
tgccgggcccacaacgcttta

SEQ ID NO: 245 - RNA, 21 nt, synthetic construct
  source 1..21: mol_type = other RNA
gccgggcccacaacgctttta

SEQ ID NO: 246 - RNA, 21 nt, synthetic construct
  source 1..21: mol_type = other RNA
gtgagggtgtctacgccatta

SEQ ID NO: 247 - RNA, 21 nt, synthetic construct
  source 1..21: mol_type = other RNA
tgagggtgtctacgccattgc

SEQ ID NO: 248 - RNA, 21 nt, synthetic construct
  source 1..21: mol_type = other RNA
gagggtgtctacgccattgca

SEQ ID NO: 249 - RNA, 21 nt, synthetic construct
  source 1..21: mol_type = other RNA
agggtgtctacgccattgcca

SEQ ID NO: 250 - RNA, 21 nt, synthetic construct
  source 1..21: mol_type = other RNA
tgtctacgccattgccaggtg

SEQ ID NO: 251 - RNA, 21 nt, synthetic construct
  source 1..21: mol_type = other RNA
gcgtccacacagctccaccaa

SEQ ID NO: 252 - RNA, 21 nt, synthetic construct
  source 1..21: mol_type = other RNA
aggccagcatggggacccgtg

SEQ ID NO: 253 - RNA, 21 nt, synthetic construct
  source 1..21: mol_type = other RNA
agcatggggacccgtgtccac

SEQ ID NO: 254 - RNA, 21 nt, synthetic construct
  source 1..21: mol_type = other RNA
catggggacccgtgtccacta

SEQ ID NO: 255 - RNA, 21 nt, synthetic construct
  source 1..21: mol_type = other RNA
atggggacccgtgtccactgc

SEQ ID NO: 256 - RNA, 21 nt, synthetic construct
  source 1..21: mol_type = other RNA
gccacgtcctcacaggctgca

SEQ ID NO: 257 - RNA, 21 nt, synthetic construct
  source 1..21: mol_type = other RNA
tgggaggtggaggaccttggc

SEQ ID NO: 258 - RNA, 21 nt, synthetic construct
  source 1..21: mol_type = other RNA
ggaccttggcacccacaagca

SEQ ID NO: 259 - RNA, 21 nt, synthetic construct
  source 1..21: mol_type = other RNA
gaccttggcacccacaagcca

SEQ ID NO: 260 - RNA, 21 nt, synthetic construct
  source 1..21: mol_type = other RNA
ccttggcacccacaagccgca

SEQ ID NO: 261 - RNA, 21 nt, synthetic construct
  source 1..21: mol_type = other RNA
ttggcacccacaagccgcctg

SEQ ID NO: 262 - RNA, 21 nt, synthetic construct
  source 1..21: mol_type = other RNA
gcacccacaagccgcctgtga

SEQ ID NO: 263 - RNA, 21 nt, synthetic construct
  source 1..21: mol_type = other RNA
acccacaagccgcctgtgctg

SEQ ID NO: 264 - RNA, 21 nt, synthetic construct
  source 1..21: mol_type = other RNA
gcctgtgctgaggccacgaga

SEQ ID NO: 265 - RNA, 21 nt, synthetic construct
  source 1..21: mol_type = other RNA
cctgtgctgaggccacgaggt

SEQ ID NO: 266 - RNA, 21 nt, synthetic construct
  source 1..21: mol_type = other RNA
cctgtgctgaggccacgagga

SEQ ID NO: 267 - RNA, 21 nt, synthetic construct
  source 1..21: mol_type = other RNA
ctgtgctgaggccacgaggta

SEQ ID NO: 268 - RNA, 21 nt, synthetic construct
  source 1..21: mol_type = other RNA
gctgaggccacgaggtcagca

SEQ ID NO: 269 - RNA, 21 nt, synthetic construct
  source 1..21: mol_type = other RNA
ctgaggccacgaggtcagcca

SEQ ID NO: 270 - RNA, 21 nt, synthetic construct
  source 1..21: mol_type = other RNA
aggccacgaggtcagcccaac

SEQ ID NO: 271 - RNA, 21 nt, synthetic construct
  source 1..21: mol_type = other RNA
acgaggtcagcccaaccagtg

SEQ ID NO: 272 - RNA, 21 nt, synthetic construct
  source 1..21: mol_type = other RNA
cgaggtcagcccaaccagtga

SEQ ID NO: 273 - RNA, 21 nt, synthetic construct
  source 1..21: mol_type = other RNA
ggaggccagcatccacgctta

SEQ ID NO: 274 - RNA, 21 nt, synthetic construct
  source 1..21: mol_type = other RNA
ccaggtctggaatgcaaagta

SEQ ID NO: 275 - RNA, 21 nt, synthetic construct
  source 1..21: mol_type = other RNA
aaagtcaaggagcatggaatc

SEQ ID NO: 276 - RNA, 21 nt, synthetic construct
  source 1..21: mol_type = other RNA
aagtcaaggagcatggaatcc

SEQ ID NO: 277 - RNA, 21 nt, synthetic construct
  source 1..21: mol_type = other RNA
caaggagcatggaatcccgga

SEQ ID NO: 278 - RNA, 21 nt, synthetic construct
  source 1..21: mol_type = other RNA
ggcctacgccgtagacaacaa

SEQ ID NO: 279 - RNA, 21 nt, synthetic construct
  source 1..21: mol_type = other RNA
gcctacgccgtagacaacaca

SEQ ID NO: 280 - RNA, 21 nt, synthetic construct
  source 1..21: mol_type = other RNA
cctacgccgtagacaacacgt

SEQ ID NO: 281 - RNA, 21 nt, synthetic construct
  source 1..21: mol_type = other RNA
cctacgccgtagacaacacga

SEQ ID NO: 282 - RNA, 21 nt, synthetic construct
  source 1..21: mol_type = other RNA
ctacgccgtagacaacacgta

SEQ ID NO: 283 - RNA, 21 nt, synthetic construct
  source 1..21: mol_type = other RNA
acgccgtagacaacacgtgtg

SEQ ID NO: 284 - RNA, 21 nt, synthetic construct
  source 1..21: mol_type = other RNA
cgccgtagacaacacgtgtgt

SEQ ID NO: 285 - RNA, 21 nt, synthetic construct
  source 1..21: mol_type = other RNA
cgccgtagacaacacgtgtga

SEQ ID NO: 286 - RNA, 21 nt, synthetic construct
  source 1..21: mol_type = other RNA
gccgtagacaacacgtgtgta

SEQ ID NO: 287 - RNA, 21 nt, synthetic construct
  source 1..21: mol_type = other RNA
tagtcaggagccgggacgtca

SEQ ID NO: 288 - RNA, 21 nt, synthetic construct
  source 1..21: mol_type = other RNA
tcaggagccgggacgtcagca

SEQ ID NO: 289 - RNA, 21 nt, synthetic construct
  source 1..21: mol_type = other RNA
cagcactacaggcagcaccaa

SEQ ID NO: 290 - RNA, 21 nt, synthetic construct
  source 1..21: mol_type = other RNA
cactacaggcagcaccagcga

SEQ ID NO: 291 - RNA, 21 nt, synthetic construct
  source 1..21: mol_type = other RNA
ccgtgacagccgttgccatct

SEQ ID NO: 292 - RNA, 21 nt, synthetic construct
  source 1..21: mol_type = other RNA
ccgtgacagccgttgccatca

SEQ ID NO: 293 - RNA, 21 nt, synthetic construct
  source 1..21: mol_type = other RNA
gacagccgttgccatctgcta

SEQ ID NO: 294 - RNA, 21 nt, synthetic construct
  source 1..21: mol_type = other RNA
gccgttgccatctgctgccga

SEQ ID NO: 295 - RNA, 21 nt, synthetic construct
  source 1..21: mol_type = other RNA
ggctggggctgagctttaaaa

SEQ ID NO: 296 - RNA, 21 nt, synthetic construct
  source 1..21: mol_type = other RNA
gctggggctgagctttaaaat

SEQ ID NO: 297 - RNA, 21 nt, synthetic construct
  source 1..21: mol_type = other RNA
gctggggctgagctttaaaaa

SEQ ID NO: 298 - RNA, 21 nt, synthetic construct
  source 1..21: mol_type = other RNA
ctggggctgagctttaaaata

SEQ ID NO: 299 - RNA, 21 nt, synthetic construct
  source 1..21: mol_type = other RNA
tggggctgagctttaaaatgg

SEQ ID NO: 300 - RNA, 21 nt, synthetic construct
  source 1..21: mol_type = other RNA
ggggctgagctttaaaatggt

SEQ ID NO: 301 - RNA, 21 nt, synthetic construct
  source 1..21: mol_type = other RNA
ggggctgagctttaaaatgga

SEQ ID NO: 302 - RNA, 21 nt, synthetic construct
  source 1..21: mol_type = other RNA
gctgagctttaaaatggttca

SEQ ID NO: 303 - RNA, 21 nt, synthetic construct
  source 1..21: mol_type = other RNA
tccctcactgtggggcatttc

SEQ ID NO: 304 - RNA, 21 nt, synthetic construct
  source 1..21: mol_type = other RNA
ccctcactgtggggcatttca

SEQ ID NO: 305 - RNA, 21 nt, synthetic construct
  source 1..21: mol_type = other RNA
ctcactgtggggcatttcaca

SEQ ID NO: 306 - RNA, 21 nt, synthetic construct
  source 1..21: mol_type = other RNA
actgtggggcatttcaccatt

SEQ ID NO: 307 - RNA, 21 nt, synthetic construct
  source 1..21: mol_type = other RNA
actgtggggcatttcaccata

SEQ ID NO: 308 - RNA, 21 nt, synthetic construct
  source 1..21: mol_type = other RNA
ctgtggggcatttcaccatta

SEQ ID NO: 309 - RNA, 21 nt, synthetic construct
  source 1..21: mol_type = other RNA
ttcaaacaggtcgagctgtgc

SEQ ID NO: 310 - RNA, 21 nt, synthetic construct
  source 1..21: mol_type = other RNA
accaaggaggcaggattcttc

SEQ ID NO: 311 - RNA, 21 nt, synthetic construct
  source 1..21: mol_type = other RNA
aggcaggattcttcccatgga

SEQ ID NO: 312 - RNA, 21 nt, synthetic construct
  source 1..21: mol_type = other RNA
gtgagtgtgaaaggtgctgat

SEQ ID NO: 313 - RNA, 21 nt, synthetic construct
  source 1..21: mol_type = other RNA
ggtgctgatggccctcatcta

SEQ ID NO: 314 - RNA, 21 nt, synthetic construct
  source 1..21: mol_type = other RNA
ctgatggccctcatctccaga

SEQ ID NO: 315 - RNA, 21 nt, synthetic construct
  source 1..21: mol_type = other RNA
taatggaggcttagctttctg

SEQ ID NO: 316 - RNA, 21 nt, synthetic construct
  source 1..21: mol_type = other RNA
cttagctttctggatggcata

SEQ ID NO: 317 - RNA, 21 nt, synthetic construct
  source 1..21: mol_type = other RNA
ttagctttctggatggcatct

SEQ ID NO: 318 - RNA, 21 nt, synthetic construct
  source 1..21: mol_type = other RNA
ttagctttctggatggcatca

SEQ ID NO: 319 - RNA, 21 nt, synthetic construct
  source 1..21: mol_type = other RNA
tagctttctggatggcatcta

SEQ ID NO: 320 - RNA, 21 nt, synthetic construct
  source 1..21: mol_type = other RNA
ctggatggcatctagccagaa

SEQ ID NO: 321 - RNA, 21 nt, synthetic construct
  source 1..21: mol_type = other RNA
tggcatctagccagaggctgg

SEQ ID NO: 322 - RNA, 21 nt, synthetic construct
  source 1..21: mol_type = other RNA
aacacccaaaggtggcctgcg

SEQ ID NO: 323 - RNA, 21 nt, synthetic construct
  source 1..21: mol_type = other RNA
ctgtctcagccaacccgctca

SEQ ID NO: 324 - RNA, 21 nt, synthetic construct
  source 1..21: mol_type = other RNA
tgtctcagccaacccgctcca

SEQ ID NO: 325 - RNA, 21 nt, synthetic construct
  source 1..21: mol_type = other RNA
tcagccaacccgctccactac

SEQ ID NO: 326 - RNA, 21 nt, synthetic construct
  source 1..21: mol_type = other RNA
agccaacccgctccactaccc

SEQ ID NO: 327 - RNA, 21 nt, synthetic construct
  source 1..21: mol_type = other RNA
gcgtgcctgccaagctcacaa

SEQ ID NO: 328 - RNA, 21 nt, synthetic construct
  source 1..21: mol_type = other RNA
ctgaagccaagcctcttctta

SEQ ID NO: 329 - RNA, 21 nt, synthetic construct
  source 1..21: mol_type = other RNA
aagccaagcctcttcttactt

SEQ ID NO: 330 - RNA, 21 nt, synthetic construct
  source 1..21: mol_type = other RNA
aagccaagcctcttcttacta

SEQ ID NO: 331 - RNA, 21 nt, synthetic construct
  source 1..21: mol_type = other RNA
agccaagcctcttcttacttc

SEQ ID NO: 332 - RNA, 21 nt, synthetic construct
  source 1..21: mol_type = other RNA
gggaaggggaacacagaccaa

SEQ ID NO: 333 - RNA, 21 nt, synthetic construct
  source 1..21: mol_type = other RNA
accaggaagctcggtgagtga

SEQ ID NO: 334 - RNA, 21 nt, synthetic construct
  source 1..21: mol_type = other RNA
aggaagctcggtgagtgatgg

SEQ ID NO: 335 - RNA, 21 nt, synthetic construct
  source 1..21: mol_type = other RNA
tggcggagatgcttctaaggc

SEQ ID NO: 336 - RNA, 21 nt, synthetic construct
  source 1..21: mol_type = other RNA
aacaactgtccctccttgagc

SEQ ID NO: 337 - RNA, 21 nt, synthetic construct
  source 1..21: mol_type = other RNA
aactgtccctccttgagcacc

SEQ ID NO: 338 - RNA, 21 nt, synthetic construct
  source 1..21: mol_type = other RNA
caccagccccacccaagcaaa

SEQ ID NO: 339 - RNA, 21 nt, synthetic construct
  source 1..21: mol_type = other RNA
gccccacccaagcaagcagaa

SEQ ID NO: 340 - RNA, 21 nt, synthetic construct
  source 1..21: mol_type = other RNA
ccccacccaagcaagcagaca

SEQ ID NO: 341 - RNA, 21 nt, synthetic construct
  source 1..21: mol_type = other RNA
acccaagcaagcagacattta

SEQ ID NO: 342 - RNA, 21 nt, synthetic construct
  source 1..21: mol_type = other RNA
cccaagcaagcagacatttat

SEQ ID NO: 343 - RNA, 21 nt, synthetic construct
  source 1..21: mol_type = other RNA
cccaagcaagcagacatttaa

SEQ ID NO: 344 - RNA, 21 nt, synthetic construct
  source 1..21: mol_type = other RNA
caagcaagcagacatttatct

SEQ ID NO: 345 - RNA, 21 nt, synthetic construct
  source 1..21: mol_type = other RNA
caagcagacatttatctttta

SEQ ID NO: 346 - RNA, 21 nt, synthetic construct
  source 1..21: mol_type = other RNA
gacatttatcttttgggtcta

SEQ ID NO: 347 - RNA, 21 nt, synthetic construct
  source 1..21: mol_type = other RNA
atttatcttttgggtctgtcc

SEQ ID NO: 348 - RNA, 21 nt, synthetic construct
  source 1..21: mol_type = other RNA
tttatcttttgggtctgtcct

SEQ ID NO: 349 - RNA, 21 nt, synthetic construct
  source 1..21: mol_type = other RNA
tttatcttttgggtctgtcca

SEQ ID NO: 350 - RNA, 21 nt, synthetic construct
  source 1..21: mol_type = other RNA
atcttttgggtctgtcctctc

SEQ ID NO: 351 - RNA, 21 nt, synthetic construct
  source 1..21: mol_type = other RNA
caacttttctagacctgtttt

SEQ ID NO: 352 - RNA, 21 nt, synthetic construct
  source 1..21: mol_type = other RNA
caacttttctagacctgttta

SEQ ID NO: 353 - RNA, 21 nt, synthetic construct
  source 1..21: mol_type = other RNA
aacttttctagacctgttttg

SEQ ID NO: 354 - RNA, 21 nt, synthetic construct
  source 1..21: mol_type = other RNA
ttttctagacctgttttgctt

SEQ ID NO: 355 - RNA, 21 nt, synthetic construct
  source 1..21: mol_type = other RNA
ctagacctgttttgcttttgt

SEQ ID NO: 356 - RNA, 21 nt, synthetic construct
  source 1..21: mol_type = other RNA
ctagacctgttttgcttttga

SEQ ID NO: 357 - RNA, 21 nt, synthetic construct
  source 1..21: mol_type = other RNA
agacctgttttgcttttgtaa

SEQ ID NO: 358 - RNA, 21 nt, synthetic construct
  source 1..21: mol_type = other RNA
tgttttgcttttgtaacttga

SEQ ID NO: 359 - RNA, 21 nt, synthetic construct
  source 1..21: mol_type = other RNA
gttttgcttttgtaacttgaa

SEQ ID NO: 360 - RNA, 21 nt, synthetic construct
  source 1..21: mol_type = other RNA
tttgcttttgtaacttgaaga

SEQ ID NO: 361 - RNA, 21 nt, synthetic construct
  source 1..21: mol_type = other RNA
ttgcttttgtaacttgaagat

SEQ ID NO: 362 - RNA, 21 nt, synthetic construct
  source 1..21: mol_type = other RNA
ttgcttttgtaacttgaagaa

SEQ ID NO: 363 - RNA, 21 nt, synthetic construct
  source 1..21: mol_type = other RNA
tgcttttgtaacttgaagata

SEQ ID NO: 364 - RNA, 21 nt, synthetic construct
  source 1..21: mol_type = other RNA
gcttttgtaacttgaagatat

SEQ ID NO: 365 - RNA, 21 nt, synthetic construct
  source 1..21: mol_type = other RNA
gcttttgtaacttgaagataa

SEQ ID NO: 366 - RNA, 21 nt, synthetic construct
  source 1..21: mol_type = other RNA
tttgtaacttgaagatattta

SEQ ID NO: 367 - RNA, 21 nt, synthetic construct
  source 1..21: mol_type = other RNA
ttgtaacttgaagatatttat

SEQ ID NO: 368 - RNA, 21 nt, synthetic construct
  source 1..21: mol_type = other RNA
attctgggttttgtagcattt

SEQ ID NO: 369 - RNA, 21 nt, synthetic construct
  source 1..21: mol_type = other RNA
attctgggttttgtagcatta

SEQ ID NO: 370 - RNA, 21 nt, synthetic construct
  source 1..21: mol_type = other RNA
ctgggttttgtagcattttta

SEQ ID NO: 371 - RNA, 21 nt, synthetic construct
  source 1..21: mol_type = other RNA
ttttgtagcatttttattaat

SEQ ID NO: 372 - RNA, 21 nt, synthetic construct
  source 1..21: mol_type = other RNA
ttgtagcatttttattaatat

SEQ ID NO: 373 - RNA, 21 nt, synthetic construct
  source 1..21: mol_type = other RNA
tagcatttttattaatatggt

SEQ ID NO: 374 - RNA, 21 nt, synthetic construct
  source 1..21: mol_type = other RNA
atttttattaatatggtgact

SEQ ID NO: 375 - RNA, 21 nt, synthetic construct
  source 1..21: mol_type = other RNA
ttttattaatatggtgacttt

SEQ ID NO: 376 - RNA, 21 nt, synthetic construct
  source 1..21: mol_type = other RNA
tttattaatatggtgactttt

SEQ ID NO: 377 - RNA, 21 nt, synthetic construct
  source 1..21: mol_type = other RNA
ttattaatatggtgacttttt

SEQ ID NO: 378 - RNA, 21 nt, synthetic construct
  source 1..21: mol_type = other RNA
tattaatatggtgacttttta

SEQ ID NO: 379 - RNA, 21 nt, synthetic construct
  source 1..21: mol_type = other RNA
attaatatggtgactttttaa

SEQ ID NO: 380 - RNA, 21 nt, synthetic construct
  source 1..21: mol_type = other RNA
taatatggtgactttttaaaa

SEQ ID NO: 381 - RNA, 21 nt, synthetic construct
  source 1..21: mol_type = other RNA
aatatggtgactttttaaaat

SEQ ID NO: 382 - RNA, 23 nt, synthetic construct
  source 1..23: mol_type = other RNA
tgcaaccatgagcgcctcgacgt

SEQ ID NO: 383 - RNA, 23 nt, synthetic construct
  source 1..23: mol_type = other RNA
tcctgcaaccatgagcgcctcga

SEQ ID NO: 384 - RNA, 23 nt, synthetic construct
  source 1..23: mol_type = other RNA
tcaacgacgcgtcccggcccgcc

SEQ ID NO: 385 - RNA, 23 nt, synthetic construct
  source 1..23: mol_type = other RNA
tgctgcaacgacgcgtcccggcc

SEQ ID NO: 386 - RNA, 23 nt, synthetic construct
  source 1..23: mol_type = other RNA
tcgcggaatcctggctgggagct

SEQ ID NO: 387 - RNA, 23 nt, synthetic construct
  source 1..23: mol_type = other RNA
tcgcgcggaatcctggctgggag

SEQ ID NO: 388 - RNA, 23 nt, synthetic construct
  source 1..23: mol_type = other RNA
taaggggcgcgcggaatcctggc

SEQ ID NO: 389 - RNA, 23 nt, synthetic construct
  source 1..23: mol_type = other RNA
tttgagccttgcggtggggagga

SEQ ID NO: 390 - RNA, 23 nt, synthetic construct
  source 1..23: mol_type = other RNA
tcttgagccttgcggtggggagg

SEQ ID NO: 391 - RNA, 23 nt, synthetic construct
  source 1..23: mol_type = other RNA
agacctagaggccgtgcgcggtc

SEQ ID NO: 392 - RNA, 23 nt, synthetic construct
  source 1..23: mol_type = other RNA
tgacctagaggccgtgcgcggtc

SEQ ID NO: 393 - RNA, 23 nt, synthetic construct
  source 1..23: mol_type = other RNA
tagacctagaggccgtgcgcggt

SEQ ID NO: 394 - RNA, 23 nt, synthetic construct
  source 1..23: mol_type = other RNA
taggagacctagaggccgtgcgc

SEQ ID NO: 395 - RNA, 23 nt, synthetic construct
  source 1..23: mol_type = other RNA
taccgcctggagctgacggtgcc

SEQ ID NO: 396 - RNA, 23 nt, synthetic construct
  source 1..23: mol_type = other RNA
tgaccgcctggagctgacggtgc

SEQ ID NO: 397 - RNA, 23 nt, synthetic construct
  source 1..23: mol_type = other RNA
aggaccgcctggagctgacggtg

SEQ ID NO: 398 - RNA, 23 nt, synthetic construct
  source 1..23: mol_type = other RNA
tggaccgcctggagctgacggtg

SEQ ID NO: 399 - RNA, 23 nt, synthetic construct
  source 1..23: mol_type = other RNA
tacgggcgcccgcgggacccagg

SEQ ID NO: 400 - RNA, 23 nt, synthetic construct
  source 1..23: mol_type = other RNA
ttcctgcgcacgggcgcccgcgg

SEQ ID NO: 401 - RNA, 23 nt, synthetic construct
  source 1..23: mol_type = other RNA
ttcgtcctcctgcgcacgggcgc

SEQ ID NO: 402 - RNA, 23 nt, synthetic construct
  source 1..23: mol_type = other RNA
tctcgtcctcctgcgcacgggcg

SEQ ID NO: 403 - RNA, 23 nt, synthetic construct
  source 1..23: mol_type = other RNA
ttagtcgccgtcctcgtcctcct

SEQ ID NO: 404 - RNA, 23 nt, synthetic construct
  source 1..23: mol_type = other RNA
tctagcaccagctcctcgtagtc

SEQ ID NO: 405 - RNA, 23 nt, synthetic construct
  source 1..23: mol_type = other RNA
taaggctagcaccagctcctcgt

SEQ ID NO: 406 - RNA, 23 nt, synthetic construct
  source 1..23: mol_type = other RNA
taacgcaaggctagcaccagctc

SEQ ID NO: 407 - RNA, 23 nt, synthetic construct
  source 1..23: mol_type = other RNA
tggaacgcaaggctagcaccagc

SEQ ID NO: 408 - RNA, 23 nt, synthetic construct
  source 1..23: mol_type = other RNA
ttcctcggaacgcaaggctagca

SEQ ID NO: 409 - RNA, 23 nt, synthetic construct
  source 1..23: mol_type = other RNA
tgctgtggttccgtgctcgggtg

SEQ ID NO: 410 - RNA, 23 nt, synthetic construct
  source 1..23: mol_type = other RNA
tgtggctgtggttccgtgctcgg

SEQ ID NO: 411 - RNA, 23 nt, synthetic construct
  source 1..23: mol_type = other RNA
tagcggtggaaggtggctgtggt

SEQ ID NO: 412 - RNA, 23 nt, synthetic construct
  source 1..23: mol_type = other RNA
ttggcgcagcggtggaaggtggc

SEQ ID NO: 413 - RNA, 23 nt, synthetic construct
  source 1..23: mol_type = other RNA
tttggcgcagcggtggaaggtgg

SEQ ID NO: 414 - RNA, 23 nt, synthetic construct
  source 1..23: mol_type = other RNA
atccttggcgcagcggtggaagg

SEQ ID NO: 415 - RNA, 23 nt, synthetic construct
  source 1..23: mol_type = other RNA
ttccttggcgcagcggtggaagg

SEQ ID NO: 416 - RNA, 23 nt, synthetic construct
  source 1..23: mol_type = other RNA
tgatccttggcgcagcggtggaa

SEQ ID NO: 417 - RNA, 23 nt, synthetic construct
  source 1..23: mol_type = other RNA
tggatccttggcgcagcggtgga

SEQ ID NO: 418 - RNA, 23 nt, synthetic construct
  source 1..23: mol_type = other RNA
tacggatccttggcgcagcggtg

SEQ ID NO: 419 - RNA, 23 nt, synthetic construct
  source 1..23: mol_type = other RNA
tcacggatccttggcgcagcggt

SEQ ID NO: 420 - RNA, 23 nt, synthetic construct
  source 1..23: mol_type = other RNA
tttcagcaccaccacgtaggtgc

SEQ ID NO: 421 - RNA, 23 nt, synthetic construct
  source 1..23: mol_type = other RNA
tgcgctctgactgcgagaggtgg

SEQ ID NO: 422 - RNA, 23 nt, synthetic construct
  source 1..23: mol_type = other RNA
ttgcgctctgactgcgagaggtg

SEQ ID NO: 423 - RNA, 23 nt, synthetic construct
  source 1..23: mol_type = other RNA
tagtgcgctctgactgcgagagg

SEQ ID NO: 424 - RNA, 23 nt, synthetic construct
  source 1..23: mol_type = other RNA
ttatccccggcgggcagcctggg

SEQ ID NO: 425 - RNA, 23 nt, synthetic construct
  source 1..23: mol_type = other RNA
aggtatccccggcgggcagcctg

SEQ ID NO: 426 - RNA, 23 nt, synthetic construct
  source 1..23: mol_type = other RNA
tggtatccccggcgggcagcctg

SEQ ID NO: 427 - RNA, 23 nt, synthetic construct
  source 1..23: mol_type = other RNA
ttgaggtatccccggcgggcagc

SEQ ID NO: 428 - RNA, 23 nt, synthetic construct
  source 1..23: mol_type = other RNA
tttggtgaggtatccccggcggg

SEQ ID NO: 429 - RNA, 23 nt, synthetic construct
  source 1..23: mol_type = other RNA
tcttggtgaggtatccccggcgg

SEQ ID NO: 430 - RNA, 23 nt, synthetic construct
  source 1..23: mol_type = other RNA
tatcttggtgaggtatccccggc

SEQ ID NO: 431 - RNA, 23 nt, synthetic construct
  source 1..23: mol_type = other RNA
tgatcttggtgaggtatccccgg

SEQ ID NO: 432 - RNA, 23 nt, synthetic construct
  source 1..23: mol_type = other RNA
tatcttcaccaggaagccaggaa

SEQ ID NO: 433 - RNA, 23 nt, synthetic construct
  source 1..23: mol_type = other RNA
taggtcgccactcatcttcacca

SEQ ID NO: 434 - RNA, 23 nt, synthetic construct
  source 1..23: mol_type = other RNA
tagcaggtcgccactcatcttca

SEQ ID NO: 435 - RNA, 23 nt, synthetic construct
  source 1..23: mol_type = other RNA
acatggggcaacttcaaggccag

SEQ ID NO: 436 - RNA, 23 nt, synthetic construct
  source 1..23: mol_type = other RNA
tcatggggcaacttcaaggccag

SEQ ID NO: 437 - RNA, 23 nt, synthetic construct
  source 1..23: mol_type = other RNA
tgacatggggcaacttcaaggcc

SEQ ID NO: 438 - RNA, 23 nt, synthetic construct
  source 1..23: mol_type = other RNA
tcgacatggggcaacttcaaggc

SEQ ID NO: 439 - RNA, 23 nt, synthetic construct
  source 1..23: mol_type = other RNA
ttcgacatggggcaacttcaagg

SEQ ID NO: 440 - RNA, 23 nt, synthetic construct
  source 1..23: mol_type = other RNA
agtcgacatggggcaacttcaag

SEQ ID NO: 441 - RNA, 23 nt, synthetic construct
  source 1..23: mol_type = other RNA
tgtcgacatggggcaacttcaag

SEQ ID NO: 442 - RNA, 23 nt, synthetic construct
  source 1..23: mol_type = other RNA
tagtcgacatggggcaacttcaa

SEQ ID NO: 443 - RNA, 23 nt, synthetic construct
  source 1..23: mol_type = other RNA
ttagtcgacatggggcaacttca

SEQ ID NO: 444 - RNA, 23 nt, synthetic construct
  source 1..23: mol_type = other RNA
tgtagtcgacatggggcaacttc

SEQ ID NO: 445 - RNA, 23 nt, synthetic construct
  source 1..23: mol_type = other RNA
atgtagtcgacatggggcaactt

SEQ ID NO: 446 - RNA, 23 nt, synthetic construct
  source 1..23: mol_type = other RNA
ttgtagtcgacatggggcaactt

SEQ ID NO: 447 - RNA, 23 nt, synthetic construct
  source 1..23: mol_type = other RNA
tgatgtagtcgacatggggcaac

SEQ ID NO: 448 - RNA, 23 nt, synthetic construct
  source 1..23: mol_type = other RNA
tcgatgtagtcgacatggggcaa

SEQ ID NO: 449 - RNA, 23 nt, synthetic construct
  source 1..23: mol_type = other RNA
ttcgatgtagtcgacatggggca

SEQ ID NO: 450 - RNA, 23 nt, synthetic construct
  source 1..23: mol_type = other RNA
ttcctcgatgtagtcgacatggg

SEQ ID NO: 451 - RNA, 23 nt, synthetic construct
  source 1..23: mol_type = other RNA
tctcctcgatgtagtcgacatgg

SEQ ID NO: 452 - RNA, 23 nt, synthetic construct
  source 1..23: mol_type = other RNA
ttcctcctcgatgtagtcgacat

SEQ ID NO: 453 - RNA, 23 nt, synthetic construct
  source 1..23: mol_type = other RNA
tgagtcctcctcgatgtagtcga

SEQ ID NO: 454 - RNA, 23 nt, synthetic construct
  source 1..23: mol_type = other RNA
tcgctccaggttccacgggatgc

SEQ ID NO: 455 - RNA, 23 nt, synthetic construct
  source 1..23: mol_type = other RNA
tgcccggtaccgtggaggggtaa

SEQ ID NO: 456 - RNA, 23 nt, synthetic construct
  source 1..23: mol_type = other RNA
tcgcccggtaccgtggaggggta

SEQ ID NO: 457 - RNA, 23 nt, synthetic construct
  source 1..23: mol_type = other RNA
tccgcccggtaccgtggaggggt

SEQ ID NO: 458 - RNA, 23 nt, synthetic construct
  source 1..23: mol_type = other RNA
tatccgcccggtaccgtggaggg

SEQ ID NO: 459 - RNA, 23 nt, synthetic construct
  source 1..23: mol_type = other RNA
tcatccgcccggtaccgtggagg

SEQ ID NO: 460 - RNA, 23 nt, synthetic construct
  source 1..23: mol_type = other RNA
ttcatccgcccggtaccgtggag

SEQ ID NO: 461 - RNA, 23 nt, synthetic construct
  source 1..23: mol_type = other RNA
attcatccgcccggtaccgtgga

SEQ ID NO: 462 - RNA, 23 nt, synthetic construct
  source 1..23: mol_type = other RNA
tttcatccgcccggtaccgtgga

SEQ ID NO: 463 - RNA, 23 nt, synthetic construct
  source 1..23: mol_type = other RNA
tattcatccgcccggtaccgtgg

SEQ ID NO: 464 - RNA, 23 nt, synthetic construct
  source 1..23: mol_type = other RNA
ttggtattcatccgcccggtacc

SEQ ID NO: 465 - RNA, 23 nt, synthetic construct
  source 1..23: mol_type = other RNA
tatacacctccaccaggctgcct

SEQ ID NO: 466 - RNA, 23 nt, synthetic construct
  source 1..23: mol_type = other RNA
tgagatacacctccaccaggctg

SEQ ID NO: 467 - RNA, 23 nt, synthetic construct
  source 1..23: mol_type = other RNA
tctaggagatacacctccaccag

SEQ ID NO: 468 - RNA, 23 nt, synthetic construct
  source 1..23: mol_type = other RNA
ttctaggagatacacctccacca

SEQ ID NO: 469 - RNA, 23 nt, synthetic construct
  source 1..23: mol_type = other RNA
ttgtctaggagatacacctccac

SEQ ID NO: 470 - RNA, 23 nt, synthetic construct
  source 1..23: mol_type = other RNA
tgtgtctaggagatacacctcca

SEQ ID NO: 471 - RNA, 23 nt, synthetic construct
  source 1..23: mol_type = other RNA
tggtgtctaggagatacacctcc

SEQ ID NO: 472 - RNA, 23 nt, synthetic construct
  source 1..23: mol_type = other RNA
ttggtgtctaggagatacacctc

SEQ ID NO: 473 - RNA, 23 nt, synthetic construct
  source 1..23: mol_type = other RNA
atgctggtgtctaggagatacac

SEQ ID NO: 474 - RNA, 23 nt, synthetic construct
  source 1..23: mol_type = other RNA
ttgctggtgtctaggagatacac

SEQ ID NO: 475 - RNA, 23 nt, synthetic construct
  source 1..23: mol_type = other RNA
tatgctggtgtctaggagataca

SEQ ID NO: 476 - RNA, 23 nt, synthetic construct
  source 1..23: mol_type = other RNA
ttatgctggtgtctaggagatac

SEQ ID NO: 477 - RNA, 23 nt, synthetic construct
  source 1..23: mol_type = other RNA
ttctgtatgctggtgtctaggag

SEQ ID NO: 478 - RNA, 23 nt, synthetic construct
  source 1..23: mol_type = other RNA
tggtcactctgtatgctggtgtc

SEQ ID NO: 479 - RNA, 23 nt, synthetic construct
  source 1..23: mol_type = other RNA
tgtggtcactctgtatgctggtg

SEQ ID NO: 480 - RNA, 23 nt, synthetic construct
  source 1..23: mol_type = other RNA
tccggtggtcactctgtatgctg

SEQ ID NO: 481 - RNA, 23 nt, synthetic construct
  source 1..23: mol_type = other RNA
ttcccggtggtcactctgtatgc

SEQ ID NO: 482 - RNA, 23 nt, synthetic construct
  source 1..23: mol_type = other RNA
tttcccggtggtcactctgtatg

SEQ ID NO: 483 - RNA, 23 nt, synthetic construct
  source 1..23: mol_type = other RNA
tatttcccggtggtcactctgta

SEQ ID NO: 484 - RNA, 23 nt, synthetic construct
  source 1..23: mol_type = other RNA
tgatttcccggtggtcactctgt

SEQ ID NO: 485 - RNA, 23 nt, synthetic construct
  source 1..23: mol_type = other RNA
tcgatttcccggtggtcactctg

SEQ ID NO: 486 - RNA, 23 nt, synthetic construct
  source 1..23: mol_type = other RNA
ttcgatttcccggtggtcactct

SEQ ID NO: 487 - RNA, 23 nt, synthetic construct
  source 1..23: mol_type = other RNA
tctcgatttcccggtggtcactc

SEQ ID NO: 488 - RNA, 23 nt, synthetic construct
  source 1..23: mol_type = other RNA
tcctcgatttcccggtggtcact

SEQ ID NO: 489 - RNA, 23 nt, synthetic construct
  source 1..23: mol_type = other RNA
atgaccctgccctcgatttcccg

SEQ ID NO: 490 - RNA, 23 nt, synthetic construct
  source 1..23: mol_type = other RNA
ttgaccctgccctcgatttcccg

SEQ ID NO: 491 - RNA, 23 nt, synthetic construct
  source 1..23: mol_type = other RNA
tatgaccctgccctcgatttccc

SEQ ID NO: 492 - RNA, 23 nt, synthetic construct
  source 1..23: mol_type = other RNA
tcatgaccctgccctcgatttcc

SEQ ID NO: 493 - RNA, 23 nt, synthetic construct
  source 1..23: mol_type = other RNA
taccatgaccctgccctcgattt

SEQ ID NO: 494 - RNA, 23 nt, synthetic construct
  source 1..23: mol_type = other RNA
tggtgaccatgaccctgccctcg

SEQ ID NO: 495 - RNA, 23 nt, synthetic construct
  source 1..23: mol_type = other RNA
ttcggtgaccatgaccctgccct

SEQ ID NO: 496 - RNA, 23 nt, synthetic construct
  source 1..23: mol_type = other RNA
agtcggtgaccatgaccctgccc

SEQ ID NO: 497 - RNA, 23 nt, synthetic construct
  source 1..23: mol_type = other RNA
tgtcggtgaccatgaccctgccc

SEQ ID NO: 498 - RNA, 23 nt, synthetic construct
  source 1..23: mol_type = other RNA
aagtcggtgaccatgaccctgcc

SEQ ID NO: 499 - RNA, 23 nt, synthetic construct
  source 1..23: mol_type = other RNA
tagtcggtgaccatgaccctgcc

SEQ ID NO: 500 - RNA, 23 nt, synthetic construct
  source 1..23: mol_type = other RNA
ttctgtggaagcgggtcccgtcc

SEQ ID NO: 501 - RNA, 23 nt, synthetic construct
  source 1..23: mol_type = other RNA
tgtctgtggaagcgggtcccgtc

SEQ ID NO: 502 - RNA, 23 nt, synthetic construct
  source 1..23: mol_type = other RNA
tacacttgctggcctgtctgtgg

SEQ ID NO: 503 - RNA, 23 nt, synthetic construct
  source 1..23: mol_type = other RNA
tgggtgccatgactgtcacactt

SEQ ID NO: 504 - RNA, 23 nt, synthetic construct
  source 1..23: mol_type = other RNA
tgaccacccctgccaggtgggtg

SEQ ID NO: 505 - RNA, 23 nt, synthetic construct
  source 1..23: mol_type = other RNA
ttgaccacccctgccaggtgggt

SEQ ID NO: 506 - RNA, 23 nt, synthetic construct
  source 1..23: mol_type = other RNA
tagttgagcacgcgcaggctgcg

SEQ ID NO: 507 - RNA, 23 nt, synthetic construct
  source 1..23: mol_type = other RNA
tcagttgagcacgcgcaggctgc

SEQ ID NO: 508 - RNA, 23 nt, synthetic construct
  source 1..23: mol_type = other RNA
tttggcagttgagcacgcgcagg

SEQ ID NO: 509 - RNA, 23 nt, synthetic construct
  source 1..23: mol_type = other RNA
tcttggcagttgagcacgcgcag

SEQ ID NO: 510 - RNA, 23 nt, synthetic construct
  source 1..23: mol_type = other RNA
tgtgcccttcccttggcagttga

SEQ ID NO: 511 - RNA, 23 nt, synthetic construct
  source 1..23: mol_type = other RNA
tcgtgcccttcccttggcagttg

SEQ ID NO: 512 - RNA, 23 nt, synthetic construct
  source 1..23: mol_type = other RNA
ttgccgctaaccgtgcccttccc

SEQ ID NO: 513 - RNA, 23 nt, synthetic construct
  source 1..23: mol_type = other RNA
tgtgccgctaaccgtgcccttcc

SEQ ID NO: 514 - RNA, 23 nt, synthetic construct
  source 1..23: mol_type = other RNA
tagggtgccgctaaccgtgccct

SEQ ID NO: 515 - RNA, 23 nt, synthetic construct
  source 1..23: mol_type = other RNA
tatgagggtgccgctaaccgtgc

SEQ ID NO: 516 - RNA, 23 nt, synthetic construct
  source 1..23: mol_type = other RNA
ttatgagggtgccgctaaccgtg

SEQ ID NO: 517 - RNA, 23 nt, synthetic construct
  source 1..23: mol_type = other RNA
tctatgagggtgccgctaaccgt

SEQ ID NO: 518 - RNA, 23 nt, synthetic construct
  source 1..23: mol_type = other RNA
ttccaggcctatgagggtgccgc

SEQ ID NO: 519 - RNA, 23 nt, synthetic construct
  source 1..23: mol_type = other RNA
aactccaggcctatgagggtgcc

SEQ ID NO: 520 - RNA, 23 nt, synthetic construct
  source 1..23: mol_type = other RNA
aaactccaggcctatgagggtgc

SEQ ID NO: 521 - RNA, 23 nt, synthetic construct
  source 1..23: mol_type = other RNA
ataaactccaggcctatgagggt

SEQ ID NO: 522 - RNA, 23 nt, synthetic construct
  source 1..23: mol_type = other RNA
ttaaactccaggcctatgagggt

SEQ ID NO: 523 - RNA, 23 nt, synthetic construct
  source 1..23: mol_type = other RNA
tcgaataaactccaggcctatga

SEQ ID NO: 524 - RNA, 23 nt, synthetic construct
  source 1..23: mol_type = other RNA
tccgaataaactccaggcctatg

SEQ ID NO: 525 - RNA, 23 nt, synthetic construct
  source 1..23: mol_type = other RNA
ttccgaataaactccaggcctat

SEQ ID NO: 526 - RNA, 23 nt, synthetic construct
  source 1..23: mol_type = other RNA
tttttccgaataaactccaggcc

SEQ ID NO: 527 - RNA, 23 nt, synthetic construct
  source 1..23: mol_type = other RNA
tcttttccgaataaactccaggc

SEQ ID NO: 528 - RNA, 23 nt, synthetic construct
  source 1..23: mol_type = other RNA
tgcttttccgaataaactccagg

SEQ ID NO: 529 - RNA, 23 nt, synthetic construct
  source 1..23: mol_type = other RNA
tagctggcttttccgaataaact

SEQ ID NO: 530 - RNA, 23 nt, synthetic construct
  source 1..23: mol_type = other RNA
tacccacccgccaggggcagcag

SEQ ID NO: 531 - RNA, 23 nt, synthetic construct
  source 1..23: mol_type = other RNA
ttacccacccgccaggggcagca

SEQ ID NO: 532 - RNA, 23 nt, synthetic construct
  source 1..23: mol_type = other RNA
tgtacccacccgccaggggcagc

SEQ ID NO: 533 - RNA, 23 nt, synthetic construct
  source 1..23: mol_type = other RNA
tcacgaccccagccctcgccagg

SEQ ID NO: 534 - RNA, 23 nt, synthetic construct
  source 1..23: mol_type = other RNA
ttgaccagcacgaccccagccct

SEQ ID NO: 535 - RNA, 23 nt, synthetic construct
  source 1..23: mol_type = other RNA
tcagcggtgaccagcacgacccc

SEQ ID NO: 536 - RNA, 23 nt, synthetic construct
  source 1..23: mol_type = other RNA
tcggcagcggtgaccagcacgac

SEQ ID NO: 537 - RNA, 23 nt, synthetic construct
  source 1..23: mol_type = other RNA
tccggcagcggtgaccagcacga

SEQ ID NO: 538 - RNA, 23 nt, synthetic construct
  source 1..23: mol_type = other RNA
tttgccggcagcggtgaccagca

SEQ ID NO: 539 - RNA, 23 nt, synthetic construct
  source 1..23: mol_type = other RNA
tggaagttgccggcagcggtgac

SEQ ID NO: 540 - RNA, 23 nt, synthetic construct
  source 1..23: mol_type = other RNA
tcgtcccggaagttgccggcagc

SEQ ID NO: 541 - RNA, 23 nt, synthetic construct
  source 1..23: mol_type = other RNA
atcgtcccggaagttgccggcag

SEQ ID NO: 542 - RNA, 23 nt, synthetic construct
  source 1..23: mol_type = other RNA
ttcgtcccggaagttgccggcag

SEQ ID NO: 543 - RNA, 23 nt, synthetic construct
  source 1..23: mol_type = other RNA
tatcgtcccggaagttgccggca

SEQ ID NO: 544 - RNA, 23 nt, synthetic construct
  source 1..23: mol_type = other RNA
tcatcgtcccggaagttgccggc

SEQ ID NO: 545 - RNA, 23 nt, synthetic construct
  source 1..23: mol_type = other RNA
tgcatcgtcccggaagttgccgg

SEQ ID NO: 546 - RNA, 23 nt, synthetic construct
  source 1..23: mol_type = other RNA
aggcatcgtcccggaagttgccg

SEQ ID NO: 547 - RNA, 23 nt, synthetic construct
  source 1..23: mol_type = other RNA
tggcatcgtcccggaagttgccg

SEQ ID NO: 548 - RNA, 23 nt, synthetic construct
  source 1..23: mol_type = other RNA
taggcatcgtcccggaagttgcc

SEQ ID NO: 549 - RNA, 23 nt, synthetic construct
  source 1..23: mol_type = other RNA
tgcaggcatcgtcccggaagttg

SEQ ID NO: 550 - RNA, 23 nt, synthetic construct
  source 1..23: mol_type = other RNA
tatgacctcgggagctgaggctg

SEQ ID NO: 551 - RNA, 23 nt, synthetic construct
  source 1..23: mol_type = other RNA
tgatgacctcgggagctgaggct

SEQ ID NO: 552 - RNA, 23 nt, synthetic construct
  source 1..23: mol_type = other RNA
ttgtgatgacctcgggagctgag

SEQ ID NO: 553 - RNA, 23 nt, synthetic construct
  source 1..23: mol_type = other RNA
taactgtgatgacctcgggagct

SEQ ID NO: 554 - RNA, 23 nt, synthetic construct
  source 1..23: mol_type = other RNA
tggtggccccaactgtgatgacc

SEQ ID NO: 555 - RNA, 23 nt, synthetic construct
  source 1..23: mol_type = other RNA
ttggtggccccaactgtgatgac

SEQ ID NO: 556 - RNA, 23 nt, synthetic construct
  source 1..23: mol_type = other RNA
aagttggtccccaaagtccccag

SEQ ID NO: 557 - RNA, 23 nt, synthetic construct
  source 1..23: mol_type = other RNA
tagttggtccccaaagtccccag

SEQ ID NO: 558 - RNA, 23 nt, synthetic construct
  source 1..23: mol_type = other RNA
aaagttggtccccaaagtcccca

SEQ ID NO: 559 - RNA, 23 nt, synthetic construct
  source 1..23: mol_type = other RNA
taagttggtccccaaagtcccca

SEQ ID NO: 560 - RNA, 23 nt, synthetic construct
  source 1..23: mol_type = other RNA
tcaaagttggtccccaaagtccc

SEQ ID NO: 561 - RNA, 23 nt, synthetic construct
  source 1..23: mol_type = other RNA
tgccaaagttggtccccaaagtc

SEQ ID NO: 562 - RNA, 23 nt, synthetic construct
  source 1..23: mol_type = other RNA
tcggccaaagttggtccccaaag

SEQ ID NO: 563 - RNA, 23 nt, synthetic construct
  source 1..23: mol_type = other RNA
tacagcggccaaagttggtcccc

SEQ ID NO: 564 - RNA, 23 nt, synthetic construct
  source 1..23: mol_type = other RNA
tacacagcggccaaagttggtcc

SEQ ID NO: 565 - RNA, 23 nt, synthetic construct
  source 1..23: mol_type = other RNA
aaagaggtccacacagcggccaa

SEQ ID NO: 566 - RNA, 23 nt, synthetic construct
  source 1..23: mol_type = other RNA
taagaggtccacacagcggccaa

SEQ ID NO: 567 - RNA, 23 nt, synthetic construct
  source 1..23: mol_type = other RNA
tcaaagaggtccacacagcggcc

SEQ ID NO: 568 - RNA, 23 nt, synthetic construct
  source 1..23: mol_type = other RNA
tgcaaagaggtccacacagcggc

SEQ ID NO: 569 - RNA, 23 nt, synthetic construct
  source 1..23: mol_type = other RNA
taccaatgatgtcctcccctggg

SEQ ID NO: 570 - RNA, 23 nt, synthetic construct
  source 1..23: mol_type = other RNA
tctggaggcaccaatgatgtcct

SEQ ID NO: 571 - RNA, 23 nt, synthetic construct
  source 1..23: mol_type = other RNA
tagtcgctggaggcaccaatgat

SEQ ID NO: 572 - RNA, 23 nt, synthetic construct
  source 1..23: mol_type = other RNA
tacaaagcaggtgctgcagtcgc

SEQ ID NO: 573 - RNA, 23 nt, synthetic construct
  source 1..23: mol_type = other RNA
tgacacaaagcaggtgctgcagt

SEQ ID NO: 574 - RNA, 23 nt, synthetic construct
  source 1..23: mol_type = other RNA
tgtgacacaaagcaggtgctgca

SEQ ID NO: 575 - RNA, 23 nt, synthetic construct
  source 1..23: mol_type = other RNA
tgcaatgccagccacgtgggcag

SEQ ID NO: 576 - RNA, 23 nt, synthetic construct
  source 1..23: mol_type = other RNA
tcatcatggctgcaatgccagcc

SEQ ID NO: 577 - RNA, 23 nt, synthetic construct
  source 1..23: mol_type = other RNA
agcatcatggctgcaatgccagc

SEQ ID NO: 578 - RNA, 23 nt, synthetic construct
  source 1..23: mol_type = other RNA
tgcatcatggctgcaatgccagc

SEQ ID NO: 579 - RNA, 23 nt, synthetic construct
  source 1..23: mol_type = other RNA
tagacagcatcatggctgcaatg

SEQ ID NO: 580 - RNA, 23 nt, synthetic construct
  source 1..23: mol_type = other RNA
tggctcggcagacagcatcatgg

SEQ ID NO: 581 - RNA, 23 nt, synthetic construct
  source 1..23: mol_type = other RNA
tccggctcggcagacagcatcat

SEQ ID NO: 582 - RNA, 23 nt, synthetic construct
  source 1..23: mol_type = other RNA
ttccggctcggcagacagcatca

SEQ ID NO: 583 - RNA, 23 nt, synthetic construct
  source 1..23: mol_type = other RNA
aactcggccagggtgagctccgg

SEQ ID NO: 584 - RNA, 23 nt, synthetic construct
  source 1..23: mol_type = other RNA
tactcggccagggtgagctccgg

SEQ ID NO: 585 - RNA, 23 nt, synthetic construct
  source 1..23: mol_type = other RNA
taactcggccagggtgagctccg

SEQ ID NO: 586 - RNA, 23 nt, synthetic construct
  source 1..23: mol_type = other RNA
tctcaactcggccagggtgagct

SEQ ID NO: 587 - RNA, 23 nt, synthetic construct
  source 1..23: mol_type = other RNA
ttctctgcctcaactcggccagg

SEQ ID NO: 588 - RNA, 23 nt, synthetic construct
  source 1..23: mol_type = other RNA
tatcagtctctgcctcaactcgg

SEQ ID NO: 589 - RNA, 23 nt, synthetic construct
  source 1..23: mol_type = other RNA
tagaagtggatcagtctctgcct

SEQ ID NO: 590 - RNA, 23 nt, synthetic construct
  source 1..23: mol_type = other RNA
agagaagtggatcagtctctgcc

SEQ ID NO: 591 - RNA, 23 nt, synthetic construct
  source 1..23: mol_type = other RNA
tgagaagtggatcagtctctgcc

SEQ ID NO: 592 - RNA, 23 nt, synthetic construct
  source 1..23: mol_type = other RNA
tagagaagtggatcagtctctgc

SEQ ID NO: 593 - RNA, 23 nt, synthetic construct
  source 1..23: mol_type = other RNA
tatgacatctttggcagagaagt

SEQ ID NO: 594 - RNA, 23 nt, synthetic construct
  source 1..23: mol_type = other RNA
tgcctcattgatgacatctttgg

SEQ ID NO: 595 - RNA, 23 nt, synthetic construct
  source 1..23: mol_type = other RNA
taaccaggcctcattgatgacat

SEQ ID NO: 596 - RNA, 23 nt, synthetic construct
  source 1..23: mol_type = other RNA
tgaaccaggcctcattgatgaca

SEQ ID NO: 597 - RNA, 23 nt, synthetic construct
  source 1..23: mol_type = other RNA
tagtacccgctggtcctcaggga

SEQ ID NO: 598 - RNA, 23 nt, synthetic construct
  source 1..23: mol_type = other RNA
ttcagtacccgctggtcctcagg

SEQ ID NO: 599 - RNA, 23 nt, synthetic construct
  source 1..23: mol_type = other RNA
tgtcagtacccgctggtcctcag

SEQ ID NO: 600 - RNA, 23 nt, synthetic construct
  source 1..23: mol_type = other RNA
tgggtcagtacccgctggtcctc

SEQ ID NO: 601 - RNA, 23 nt, synthetic construct
  source 1..23: mol_type = other RNA
ttgtaggccccgagtgtgctgac

SEQ ID NO: 602 - RNA, 23 nt, synthetic construct
  source 1..23: mol_type = other RNA
tgtgtaggccccgagtgtgctga

SEQ ID NO: 603 - RNA, 23 nt, synthetic construct
  source 1..23: mol_type = other RNA
tcgtgtaggccccgagtgtgctg

SEQ ID NO: 604 - RNA, 23 nt, synthetic construct
  source 1..23: mol_type = other RNA
tccgtgtaggccccgagtgtgct

SEQ ID NO: 605 - RNA, 23 nt, synthetic construct
  source 1..23: mol_type = other RNA
atccgtgtaggccccgagtgtgc

SEQ ID NO: 606 - RNA, 23 nt, synthetic construct
  source 1..23: mol_type = other RNA
ttccgtgtaggccccgagtgtgc

SEQ ID NO: 607 - RNA, 23 nt, synthetic construct
  source 1..23: mol_type = other RNA
tatccgtgtaggccccgagtgtg

SEQ ID NO: 608 - RNA, 23 nt, synthetic construct
  source 1..23: mol_type = other RNA
tgccatccgtgtaggccccgagt

SEQ ID NO: 609 - RNA, 23 nt, synthetic construct
  source 1..23: mol_type = other RNA
tctgtggccatccgtgtaggccc

SEQ ID NO: 610 - RNA, 23 nt, synthetic construct
  source 1..23: mol_type = other RNA
tgctgtggccatccgtgtaggcc

SEQ ID NO: 611 - RNA, 23 nt, synthetic construct
  source 1..23: mol_type = other RNA
aaactggagcagctcagcagctc

SEQ ID NO: 612 - RNA, 23 nt, synthetic construct
  source 1..23: mol_type = other RNA
taactggagcagctcagcagctc

SEQ ID NO: 613 - RNA, 23 nt, synthetic construct
  source 1..23: mol_type = other RNA
tagaaactggagcagctcagcag

SEQ ID NO: 614 - RNA, 23 nt, synthetic construct
  source 1..23: mol_type = other RNA
tttgggcctccatgcgctcgccc

SEQ ID NO: 615 - RNA, 23 nt, synthetic construct
  source 1..23: mol_type = other RNA
tgcccggcagaccagcttgcccc

SEQ ID NO: 616 - RNA, 23 nt, synthetic construct
  source 1..23: mol_type = other RNA
tttgtgggcccggcagaccagct

SEQ ID NO: 617 - RNA, 23 nt, synthetic construct
  source 1..23: mol_type = other RNA
tcgttgtgggcccggcagaccag

SEQ ID NO: 618 - RNA, 23 nt, synthetic construct
  source 1..23: mol_type = other RNA
agcgttgtgggcccggcagacca

SEQ ID NO: 619 - RNA, 23 nt, synthetic construct
  source 1..23: mol_type = other RNA
tgcgttgtgggcccggcagacca

SEQ ID NO: 620 - RNA, 23 nt, synthetic construct
  source 1..23: mol_type = other RNA
aagcgttgtgggcccggcagacc

SEQ ID NO: 621 - RNA, 23 nt, synthetic construct
  source 1..23: mol_type = other RNA
tagcgttgtgggcccggcagacc

SEQ ID NO: 622 - RNA, 23 nt, synthetic construct
  source 1..23: mol_type = other RNA
aaaagcgttgtgggcccggcaga

SEQ ID NO: 623 - RNA, 23 nt, synthetic construct
  source 1..23: mol_type = other RNA
taaagcgttgtgggcccggcaga

SEQ ID NO: 624 - RNA, 23 nt, synthetic construct
  source 1..23: mol_type = other RNA
taaaagcgttgtgggcccggcag

SEQ ID NO: 625 - RNA, 23 nt, synthetic construct
  source 1..23: mol_type = other RNA
taatggcgtagacaccctcaccc

SEQ ID NO: 626 - RNA, 23 nt, synthetic construct
  source 1..23: mol_type = other RNA
tcaatggcgtagacaccctcacc

SEQ ID NO: 627 - RNA, 23 nt, synthetic construct
  source 1..23: mol_type = other RNA
tgcaatggcgtagacaccctcac

SEQ ID NO: 628 - RNA, 23 nt, synthetic construct
  source 1..23: mol_type = other RNA
tggcaatggcgtagacaccctca

SEQ ID NO: 629 - RNA, 23 nt, synthetic construct
  source 1..23: mol_type = other RNA
tacctggcaatggcgtagacacc

SEQ ID NO: 630 - RNA, 23 nt, synthetic construct
  source 1..23: mol_type = other RNA
ttggtggagctgtgtggacgctg

SEQ ID NO: 631 - RNA, 23 nt, synthetic construct
  source 1..23: mol_type = other RNA
tacgggtccccatgctggcctca

SEQ ID NO: 632 - RNA, 23 nt, synthetic construct
  source 1..23: mol_type = other RNA
ttggacacgggtccccatgctgg

SEQ ID NO: 633 - RNA, 23 nt, synthetic construct
  source 1..23: mol_type = other RNA
tagtggacacgggtccccatgct

SEQ ID NO: 634 - RNA, 23 nt, synthetic construct
  source 1..23: mol_type = other RNA
tcagtggacacgggtccccatgc

SEQ ID NO: 635 - RNA, 23 nt, synthetic construct
  source 1..23: mol_type = other RNA
tgcagcctgtgaggacgtggccc

SEQ ID NO: 636 - RNA, 23 nt, synthetic construct
  source 1..23: mol_type = other RNA
tccaaggtcctccacctcccagt

SEQ ID NO: 637 - RNA, 23 nt, synthetic construct
  source 1..23: mol_type = other RNA
tgcttgtgggtgccaaggtcctc

SEQ ID NO: 638 - RNA, 23 nt, synthetic construct
  source 1..23: mol_type = other RNA
tggcttgtgggtgccaaggtcct

SEQ ID NO: 639 - RNA, 23 nt, synthetic construct
  source 1..23: mol_type = other RNA
tgcggcttgtgggtgccaaggtc

SEQ ID NO: 640 - RNA, 23 nt, synthetic construct
  source 1..23: mol_type = other RNA
taggcggcttgtgggtgccaagg

SEQ ID NO: 641 - RNA, 23 nt, synthetic construct
  source 1..23: mol_type = other RNA
tcacaggcggcttgtgggtgcca

SEQ ID NO: 642 - RNA, 23 nt, synthetic construct
  source 1..23: mol_type = other RNA
tagcacaggcggcttgtgggtgc

SEQ ID NO: 643 - RNA, 23 nt, synthetic construct
  source 1..23: mol_type = other RNA
tctcgtggcctcagcacaggcgg

SEQ ID NO: 644 - RNA, 23 nt, synthetic construct
  source 1..23: mol_type = other RNA
acctcgtggcctcagcacaggcg

SEQ ID NO: 645 - RNA, 23 nt, synthetic construct
  source 1..23: mol_type = other RNA
tcctcgtggcctcagcacaggcg

SEQ ID NO: 646 - RNA, 23 nt, synthetic construct
  source 1..23: mol_type = other RNA
tacctcgtggcctcagcacaggc

SEQ ID NO: 647 - RNA, 23 nt, synthetic construct
  source 1..23: mol_type = other RNA
tgctgacctcgtggcctcagcac

SEQ ID NO: 648 - RNA, 23 nt, synthetic construct
  source 1..23: mol_type = other RNA
tggctgacctcgtggcctcagca

SEQ ID NO: 649 - RNA, 23 nt, synthetic construct
  source 1..23: mol_type = other RNA
tttgggctgacctcgtggcctca

SEQ ID NO: 650 - RNA, 23 nt, synthetic construct
  source 1..23: mol_type = other RNA
tactggttgggctgacctcgtgg

SEQ ID NO: 651 - RNA, 23 nt, synthetic construct
  source 1..23: mol_type = other RNA
tcactggttgggctgacctcgtg

SEQ ID NO: 652 - RNA, 23 nt, synthetic construct
  source 1..23: mol_type = other RNA
taagcgtggatgctggcctccct

SEQ ID NO: 653 - RNA, 23 nt, synthetic construct
  source 1..23: mol_type = other RNA
tactttgcattccagacctgggg

SEQ ID NO: 654 - RNA, 23 nt, synthetic construct
  source 1..23: mol_type = other RNA
tattccatgctccttgactttgc

SEQ ID NO: 655 - RNA, 23 nt, synthetic construct
  source 1..23: mol_type = other RNA
tgattccatgctccttgactttg

SEQ ID NO: 656 - RNA, 23 nt, synthetic construct
  source 1..23: mol_type = other RNA
tccgggattccatgctccttgac

SEQ ID NO: 657 - RNA, 23 nt, synthetic construct
  source 1..23: mol_type = other RNA
ttgttgtctacggcgtaggcccc

SEQ ID NO: 658 - RNA, 23 nt, synthetic construct
  source 1..23: mol_type = other RNA
tgtgttgtctacggcgtaggccc

SEQ ID NO: 659 - RNA, 23 nt, synthetic construct
  source 1..23: mol_type = other RNA
acgtgttgtctacggcgtaggcc

SEQ ID NO: 660 - RNA, 23 nt, synthetic construct
  source 1..23: mol_type = other RNA
tcgtgttgtctacggcgtaggcc

SEQ ID NO: 661 - RNA, 23 nt, synthetic construct
  source 1..23: mol_type = other RNA
tacgtgttgtctacggcgtaggc

SEQ ID NO: 662 - RNA, 23 nt, synthetic construct
  source 1..23: mol_type = other RNA
tacacgtgttgtctacggcgtag

SEQ ID NO: 663 - RNA, 23 nt, synthetic construct
  source 1..23: mol_type = other RNA
acacacgtgttgtctacggcgta

SEQ ID NO: 664 - RNA, 23 nt, synthetic construct
  source 1..23: mol_type = other RNA
tcacacgtgttgtctacggcgta

SEQ ID NO: 665 - RNA, 23 nt, synthetic construct
  source 1..23: mol_type = other RNA
tacacacgtgttgtctacggcgt

SEQ ID NO: 666 - RNA, 23 nt, synthetic construct
  source 1..23: mol_type = other RNA
tgacgtcccggctcctgactaca

SEQ ID NO: 667 - RNA, 23 nt, synthetic construct
  source 1..23: mol_type = other RNA
tgctgacgtcccggctcctgact

SEQ ID NO: 668 - RNA, 23 nt, synthetic construct
  source 1..23: mol_type = other RNA
ttggtgctgcctgtagtgctgac

SEQ ID NO: 669 - RNA, 23 nt, synthetic construct
  source 1..23: mol_type = other RNA
tcgctggtgctgcctgtagtgct

SEQ ID NO: 670 - RNA, 23 nt, synthetic construct
  source 1..23: mol_type = other RNA
agatggcaacggctgtcacggcc

SEQ ID NO: 671 - RNA, 23 nt, synthetic construct
  source 1..23: mol_type = other RNA
tgatggcaacggctgtcacggcc

SEQ ID NO: 672 - RNA, 23 nt, synthetic construct
  source 1..23: mol_type = other RNA
tagcagatggcaacggctgtcac

SEQ ID NO: 673 - RNA, 23 nt, synthetic construct
  source 1..23: mol_type = other RNA
tcggcagcagatggcaacggctg

SEQ ID NO: 674 - RNA, 23 nt, synthetic construct
  source 1..23: mol_type = other RNA
ttttaaagctcagccccagccct

SEQ ID NO: 675 - RNA, 23 nt, synthetic construct
  source 1..23: mol_type = other RNA
attttaaagctcagccccagccc

SEQ ID NO: 676 - RNA, 23 nt, synthetic construct
  source 1..23: mol_type = other RNA
tttttaaagctcagccccagccc

SEQ ID NO: 677 - RNA, 23 nt, synthetic construct
  source 1..23: mol_type = other RNA
tattttaaagctcagccccagcc

SEQ ID NO: 678 - RNA, 23 nt, synthetic construct
  source 1..23: mol_type = other RNA
tcattttaaagctcagccccagc

SEQ ID NO: 679 - RNA, 23 nt, synthetic construct
  source 1..23: mol_type = other RNA
accattttaaagctcagccccag

SEQ ID NO: 680 - RNA, 23 nt, synthetic construct
  source 1..23: mol_type = other RNA
tccattttaaagctcagccccag

SEQ ID NO: 681 - RNA, 23 nt, synthetic construct
  source 1..23: mol_type = other RNA
tgaaccattttaaagctcagccc

SEQ ID NO: 682 - RNA, 23 nt, synthetic construct
  source 1..23: mol_type = other RNA
taaatgccccacagtgagggagg

SEQ ID NO: 683 - RNA, 23 nt, synthetic construct
  source 1..23: mol_type = other RNA
tgaaatgccccacagtgagggag

SEQ ID NO: 684 - RNA, 23 nt, synthetic construct
  source 1..23: mol_type = other RNA
tgtgaaatgccccacagtgaggg

SEQ ID NO: 685 - RNA, 23 nt, synthetic construct
  source 1..23: mol_type = other RNA
aatggtgaaatgccccacagtga

SEQ ID NO: 686 - RNA, 23 nt, synthetic construct
  source 1..23: mol_type = other RNA
tatggtgaaatgccccacagtga

SEQ ID NO: 687 - RNA, 23 nt, synthetic construct
  source 1..23: mol_type = other RNA
taatggtgaaatgccccacagtg

SEQ ID NO: 688 - RNA, 23 nt, synthetic construct
  source 1..23: mol_type = other RNA
tcacagctcgacctgtttgaatg

SEQ ID NO: 689 - RNA, 23 nt, synthetic construct
  source 1..23: mol_type = other RNA
taagaatcctgcctccttggtgg

SEQ ID NO: 690 - RNA, 23 nt, synthetic construct
  source 1..23: mol_type = other RNA
tccatgggaagaatcctgcctcc

SEQ ID NO: 691 - RNA, 23 nt, synthetic construct
  source 1..23: mol_type = other RNA
atcagcacctttcacactcaccc

SEQ ID NO: 692 - RNA, 23 nt, synthetic construct
  source 1..23: mol_type = other RNA
tagatgagggccatcagcacctt

SEQ ID NO: 693 - RNA, 23 nt, synthetic construct
  source 1..23: mol_type = other RNA
tctggagatgagggccatcagca

SEQ ID NO: 694 - RNA, 23 nt, synthetic construct
  source 1..23: mol_type = other RNA
tagaaagctaagcctccattaat

SEQ ID NO: 695 - RNA, 23 nt, synthetic construct
  source 1..23: mol_type = other RNA
tatgccatccagaaagctaagcc

SEQ ID NO: 696 - RNA, 23 nt, synthetic construct
  source 1..23: mol_type = other RNA
agatgccatccagaaagctaagc

SEQ ID NO: 697 - RNA, 23 nt, synthetic construct
  source 1..23: mol_type = other RNA
tgatgccatccagaaagctaagc

SEQ ID NO: 698 - RNA, 23 nt, synthetic construct
  source 1..23: mol_type = other RNA
tagatgccatccagaaagctaag

SEQ ID NO: 699 - RNA, 23 nt, synthetic construct
  source 1..23: mol_type = other RNA
ttctggctagatgccatccagaa

SEQ ID NO: 700 - RNA, 23 nt, synthetic construct
  source 1..23: mol_type = other RNA
tcagcctctggctagatgccatc

SEQ ID NO: 701 - RNA, 23 nt, synthetic construct
  source 1..23: mol_type = other RNA
tgcaggccacctttgggtgttgc

SEQ ID NO: 702 - RNA, 23 nt, synthetic construct
  source 1..23: mol_type = other RNA
tgagcgggttggctgagacagtg

SEQ ID NO: 703 - RNA, 23 nt, synthetic construct
  source 1..23: mol_type = other RNA
tggagcgggttggctgagacagt

SEQ ID NO: 704 - RNA, 23 nt, synthetic construct
  source 1..23: mol_type = other RNA
ttagtggagcgggttggctgaga

SEQ ID NO: 705 - RNA, 23 nt, synthetic construct
  source 1..23: mol_type = other RNA
tggtagtggagcgggttggctga

SEQ ID NO: 706 - RNA, 23 nt, synthetic construct
  source 1..23: mol_type = other RNA
ttgtgagcttggcaggcacgccc

SEQ ID NO: 707 - RNA, 23 nt, synthetic construct
  source 1..23: mol_type = other RNA
taagaagaggcttggcttcagag

SEQ ID NO: 708 - RNA, 23 nt, synthetic construct
  source 1..23: mol_type = other RNA
aagtaagaagaggcttggcttca

SEQ ID NO: 709 - RNA, 23 nt, synthetic construct
  source 1..23: mol_type = other RNA
tagtaagaagaggcttggcttca

SEQ ID NO: 710 - RNA, 23 nt, synthetic construct
  source 1..23: mol_type = other RNA
taagtaagaagaggcttggcttc

SEQ ID NO: 711 - RNA, 23 nt, synthetic construct
  source 1..23: mol_type = other RNA
ttggtctgtgttccccttcccag

SEQ ID NO: 712 - RNA, 23 nt, synthetic construct
  source 1..23: mol_type = other RNA
tcactcaccgagcttcctggtct

SEQ ID NO: 713 - RNA, 23 nt, synthetic construct
  source 1..23: mol_type = other RNA
tcatcactcaccgagcttcctgg

SEQ ID NO: 714 - RNA, 23 nt, synthetic construct
  source 1..23: mol_type = other RNA
tccttagaagcatctccgccagg

SEQ ID NO: 715 - RNA, 23 nt, synthetic construct
  source 1..23: mol_type = other RNA
tctcaaggagggacagttgttgg

SEQ ID NO: 716 - RNA, 23 nt, synthetic construct
  source 1..23: mol_type = other RNA
tgtgctcaaggagggacagttgt

SEQ ID NO: 717 - RNA, 23 nt, synthetic construct
  source 1..23: mol_type = other RNA
tttgcttgggtggggctggtgct

SEQ ID NO: 718 - RNA, 23 nt, synthetic construct
  source 1..23: mol_type = other RNA
ttctgcttgcttgggtggggctg

SEQ ID NO: 719 - RNA, 23 nt, synthetic construct
  source 1..23: mol_type = other RNA
tgtctgcttgcttgggtggggct

SEQ ID NO: 720 - RNA, 23 nt, synthetic construct
  source 1..23: mol_type = other RNA
taaatgtctgcttgcttgggtgg

SEQ ID NO: 721 - RNA, 23 nt, synthetic construct
  source 1..23: mol_type = other RNA
ataaatgtctgcttgcttgggtg

SEQ ID NO: 722 - RNA, 23 nt, synthetic construct
  source 1..23: mol_type = other RNA
ttaaatgtctgcttgcttgggtg

SEQ ID NO: 723 - RNA, 23 nt, synthetic construct
  source 1..23: mol_type = other RNA
agataaatgtctgcttgcttggg

SEQ ID NO: 724 - RNA, 23 nt, synthetic construct
  source 1..23: mol_type = other RNA
taaaagataaatgtctgcttgct

SEQ ID NO: 725 - RNA, 23 nt, synthetic construct
  source 1..23: mol_type = other RNA
tagacccaaaagataaatgtctg

SEQ ID NO: 726 - RNA, 23 nt, synthetic construct
  source 1..23: mol_type = other RNA
tgacagacccaaaagataaatgt

SEQ ID NO: 727 - RNA, 23 nt, synthetic construct
  source 1..23: mol_type = other RNA
aggacagacccaaaagataaatg

SEQ ID NO: 728 - RNA, 23 nt, synthetic construct
  source 1..23: mol_type = other RNA
tggacagacccaaaagataaatg

SEQ ID NO: 729 - RNA, 23 nt, synthetic construct
  source 1..23: mol_type = other RNA
tagaggacagacccaaaagataa

SEQ ID NO: 730 - RNA, 23 nt, synthetic construct
  source 1..23: mol_type = other RNA
aaaacaggtctagaaaagttggc

SEQ ID NO: 731 - RNA, 23 nt, synthetic construct
  source 1..23: mol_type = other RNA
taaacaggtctagaaaagttggc

SEQ ID NO: 732 - RNA, 23 nt, synthetic construct
  source 1..23: mol_type = other RNA
taaaacaggtctagaaaagttgg

SEQ ID NO: 733 - RNA, 23 nt, synthetic construct
  source 1..23: mol_type = other RNA
aagcaaaacaggtctagaaaagt

SEQ ID NO: 734 - RNA, 23 nt, synthetic construct
  source 1..23: mol_type = other RNA
acaaaagcaaaacaggtctagaa

SEQ ID NO: 735 - RNA, 23 nt, synthetic construct
  source 1..23: mol_type = other RNA
tcaaaagcaaaacaggtctagaa

SEQ ID NO: 736 - RNA, 23 nt, synthetic construct
  source 1..23: mol_type = other RNA
ttacaaaagcaaaacaggtctag

SEQ ID NO: 737 - RNA, 23 nt, synthetic construct
  source 1..23: mol_type = other RNA
tcaagttacaaaagcaaaacagg

SEQ ID NO: 738 - RNA, 23 nt, synthetic construct
  source 1..23: mol_type = other RNA
ttcaagttacaaaagcaaaacag

SEQ ID NO: 739 - RNA, 23 nt, synthetic construct
  source 1..23: mol_type = other RNA
tcttcaagttacaaaagcaaaac

SEQ ID NO: 740 - RNA, 23 nt, synthetic construct
  source 1..23: mol_type = other RNA
atcttcaagttacaaaagcaaaa

SEQ ID NO: 741 - RNA, 23 nt, synthetic construct
  source 1..23: mol_type = other RNA
ttcttcaagttacaaaagcaaaa

SEQ ID NO: 742 - RNA, 23 nt, synthetic construct
  source 1..23: mol_type = other RNA
tatcttcaagttacaaaagcaaa

SEQ ID NO: 743 - RNA, 23 nt, synthetic construct
  source 1..23: mol_type = other RNA
atatcttcaagttacaaaagcaa

SEQ ID NO: 744 - RNA, 23 nt, synthetic construct
  source 1..23: mol_type = other RNA
ttatcttcaagttacaaaagcaa

SEQ ID NO: 745 - RNA, 23 nt, synthetic construct
  source 1..23: mol_type = other RNA
taaatatcttcaagttacaaaag

SEQ ID NO: 746 - RNA, 23 nt, synthetic construct
  source 1..23: mol_type = other RNA
ataaatatcttcaagttacaaaa

SEQ ID NO: 747 - RNA, 23 nt, synthetic construct
  source 1..23: mol_type = other RNA
aaatgctacaaaacccagaataa

SEQ ID NO: 748 - RNA, 23 nt, synthetic construct
  source 1..23: mol_type = other RNA
taatgctacaaaacccagaataa

SEQ ID NO: 749 - RNA, 23 nt, synthetic construct
  source 1..23: mol_type = other RNA
taaaaatgctacaaaacccagaa

SEQ ID NO: 750 - RNA, 23 nt, synthetic construct
  source 1..23: mol_type = other RNA
attaataaaaatgctacaaaacc

SEQ ID NO: 751 - RNA, 23 nt, synthetic construct
  source 1..23: mol_type = other RNA
atattaataaaaatgctacaaaa

SEQ ID NO: 752 - RNA, 23 nt, synthetic construct
  source 1..23: mol_type = other RNA
accatattaataaaaatgctaca

SEQ ID NO: 753 - RNA, 23 nt, synthetic construct
  source 1..23: mol_type = other RNA
agtcaccatattaataaaaatgc

SEQ ID NO: 754 - RNA, 23 nt, synthetic construct
  source 1..23: mol_type = other RNA
aaagtcaccatattaataaaaat

SEQ ID NO: 755 - RNA, 23 nt, synthetic construct
  source 1..23: mol_type = other RNA
aaaagtcaccatattaataaaaa

SEQ ID NO: 756 - RNA, 23 nt, synthetic construct
  source 1..23: mol_type = other RNA
aaaaagtcaccatattaataaaa

SEQ ID NO: 757 - RNA, 23 nt, synthetic construct
  source 1..23: mol_type = other RNA
taaaaagtcaccatattaataaa

SEQ ID NO: 758 - RNA, 23 nt, synthetic construct
  source 1..23: mol_type = other RNA
ttaaaaagtcaccatattaataa

SEQ ID NO: 759 - RNA, 23 nt, synthetic construct
  source 1..23: mol_type = other RNA
ttttaaaaagtcaccatattaat

SEQ ID NO: 760 - RNA, 23 nt, synthetic construct
  source 1..23: mol_type = other RNA
attttaaaaagtcaccatattaa

SEQ ID NO: 761 - RNA, 21 nt, synthetic construct
  source 1..21: mol_type = other RNA
ctagacctgttttgcttttgt

SEQ ID NO: 762 - RNA, 21 nt, synthetic construct
  source 1..21: mol_type = other RNA
caagcagacatttatctttta

SEQ ID NO: 763 - RNA, 21 nt, synthetic construct
  source 1..21: mol_type = other RNA
caacttttctagacctgtttt

SEQ ID NO: 764 - RNA, 21 nt, synthetic construct
  source 1..21: mol_type = other RNA
gcttttgtaacttgaagatat

SEQ ID NO: 765 - RNA, 21 nt, synthetic construct
  source 1..21: mol_type = other RNA
ttgaagttgccccatgtcgaa

SEQ ID NO: 766 - RNA, 21 nt, synthetic construct
  source 1..21: mol_type = other RNA
cctcataggcctggagtttat

SEQ ID NO: 767 - RNA, 21 nt, synthetic construct
  source 1..21: mol_type = other RNA
aagccaagcctcttcttactt

SEQ ID NO: 768 - RNA, 21 nt, synthetic construct
  source 1..21: mol_type = other RNA
agccaagcctcttcttactta

SEQ ID NO: 769 - RNA, 21 nt, synthetic construct
  source 1..21: mol_type = other RNA
ttttctagacctgttttgctt

SEQ ID NO: 770 - RNA, 21 nt, synthetic construct
  source 1..21: mol_type = other RNA
agacctgttttgcttttgtaa

SEQ ID NO: 771 - RNA, 21 nt, synthetic construct
  source 1..21: mol_type = other RNA
ttgtaacttgaagatatttat

SEQ ID NO: 772 - RNA, 21 nt, synthetic construct
  source 1..21: mol_type = other RNA
gttttgcttttgtaacttgaa

SEQ ID NO: 773 - RNA, 21 nt, synthetic construct
  source 1..21: mol_type = other RNA
tggtgctagccttgcgttcca

SEQ ID NO: 774 - RNA, 21 nt, synthetic construct
  source 1..21: mol_type = other RNA
agtgaccaccgggaaatcgaa

SEQ ID NO: 775 - RNA, 21 nt, synthetic construct
  source 1..21: mol_type = other RNA
taatggaggcttagctttcta

SEQ ID NO: 776 - RNA, 21 nt, synthetic construct
  source 1..21: mol_type = other RNA
agacaccagcatacagagtga

SEQ ID NO: 777 - RNA, 23 nt, synthetic construct
  source 1..23: mol_type = other RNA
acaaaagcaaaacaggtctagaa

SEQ ID NO: 778 - RNA, 23 nt, synthetic construct
  source 1..23: mol_type = other RNA
taaaagataaatgtctgcttgct

SEQ ID NO: 779 - RNA, 23 nt, synthetic construct
  source 1..23: mol_type = other RNA
aaaacaggtctagaaaagttggc

SEQ ID NO: 780 - RNA, 23 nt, synthetic construct
  source 1..23: mol_type = other RNA
atatcttcaagttacaaaagcaa

SEQ ID NO: 781 - RNA, 23 nt, synthetic construct
  source 1..23: mol_type = other RNA
ttcgacatggggcaacttcaagg

SEQ ID NO: 782 - RNA, 23 nt, synthetic construct
  source 1..23: mol_type = other RNA
ataaactccaggcctatgagggt

SEQ ID NO: 783 - RNA, 23 nt, synthetic construct
  source 1..23: mol_type = other RNA
aagtaagaagaggcttggcttca

SEQ ID NO: 784 - RNA, 23 nt, synthetic construct
  source 1..23: mol_type = other RNA
taagtaagaagaggcttggcttc

SEQ ID NO: 785 - RNA, 23 nt, synthetic construct
  source 1..23: mol_type = other RNA
aagcaaaacaggtctagaaaagt

SEQ ID NO: 786 - RNA, 23 nt, synthetic construct
  source 1..23: mol_type = other RNA
ttacaaaagcaaaacaggtctag

SEQ ID NO: 787 - RNA, 23 nt, synthetic construct
  source 1..23: mol_type = other RNA
ataaatatcttcaagttacaaaa

SEQ ID NO: 788 - RNA, 23 nt, synthetic construct
  source 1..23: mol_type = other RNA
ttcaagttacaaaagcaaaacag

SEQ ID NO: 789 - RNA, 23 nt, synthetic construct
  source 1..23: mol_type = other RNA
tggaacgcaaggctagcaccagc

SEQ ID NO: 790 - RNA, 23 nt, synthetic construct
  source 1..23: mol_type = other RNA
ttcgatttcccggtggtcactct

SEQ ID NO: 791 - RNA, 23 nt, synthetic construct
  source 1..23: mol_type = other RNA
tagaaagctaagcctccattaat

SEQ ID NO: 792 - RNA, 23 nt, synthetic construct
  source 1..23: mol_type = other RNA
tcactctgtatgctggtgtctag

SEQ ID NO: 793 - DNA, 21 bp, synthetic construct
  source 1..21: mol_type = other DNA
  modified_base 1: mod_base = OTHER; note = 2'-O-methylcytidine-3'-phosphorothioate
  modified_base 2: mod_base = OTHER; note = 2'-O-methyluridine-3'-phosphorothioate
  modified_base 3: mod_base = OTHER; note = 2'-O-methyladenosine-3'-phosphate
  modified_base 4: mod_base = OTHER; note = 2'-O-methylguanosine-3'-phosphate
  modified_base 5: mod_base = OTHER; note = 2'-O-methyladenosine-3'-phosphate
  modified_base 6: mod_base = OTHER; note = 2'-O-methylcytidine-3'-phosphate
  modified_base 7: mod_base = OTHER; note = 2'-fluorocytidine-3'-phosphate
  modified_base 8: mod_base = OTHER; note = 2'-O-methyluridine-3'-phosphate
  modified_base 9: mod_base = OTHER; note = 2'-fluoroguanosine-3'-phosphate
  modified_base 10: mod_base = OTHER; note = 2'-O-methyluridine-3'-phosphate
  modified_base 12: mod_base = OTHER; note = 2'-O-methyluridine-3'-phosphate
  modified_base 13: mod_base = OTHER; note = 2'-O-methyluridine-3'-phosphate
  modified_base 14: mod_base = OTHER; note = 2'-O-methylguanosine-3'-phosphate
  modified_base 15: mod_base = OTHER; note = 2'-O-methylcytidine-3'-phosphate
  modified_base 16: mod_base = OTHER; note = 2'-O-methyluridine-3'-phosphate
  modified_base 17: mod_base = OTHER; note = 2'-O-methyluridine-3'-phosphate
  modified_base 18: mod_base = OTHER; note = 2'-O-methyluridine-3'-phosphate
  modified_base 19: mod_base = OTHER; note = 2'-O-methyluridine-3'-phosphate
  modified_base 20: mod_base = OTHER; note = 2'-O-methylguanosine-3'-phosphate
  modified_base 21: mod_base = OTHER; note = 2'-O-methyluridine
  misc_feature 1..10: note = RNA
  misc_feature 11: note = DNA
  misc_feature 12..21: note = RNA
ctagacctgttttgcttttgt

SEQ ID NO: 794 - DNA, 21 bp, synthetic construct
  source 1..21: mol_type = other DNA
  modified_base 1: mod_base = OTHER; note = 2'-O-methylcytidine-3'-phosphorothioate
  modified_base 2: mod_base = OTHER; note = 2'-O-methyluridine-3'-phosphorothioate
  modified_base 3: mod_base = OTHER; note = 2'-O-methyladenosine-3'-phosphate
  modified_base 4: mod_base = OTHER; note = 2'-O-methylguanosine-3'-phosphate
  modified_base 5: mod_base = OTHER; note = 2'-O-methyladenosine-3'-phosphate
  modified_base 6: mod_base = OTHER; note = 2'-O-methylcytidine-3'-phosphate
  modified_base 7: mod_base = OTHER; note = 2'-fluorocytidine-3'-phosphate
  modified_base 8: mod_base = OTHER; note = 2'-O-methyluridine-3'-phosphate
  modified_base 9: mod_base = OTHER; note = 2'-fluoroguanosine-3'-phosphate
  modified_base 10: mod_base = OTHER; note = 2'-fluorouridine-3'-phosphate
  modified_base 12: mod_base = OTHER; note = 2'-O-methyluridine-3'-phosphate
  modified_base 13: mod_base = OTHER; note = 2'-O-methyluridine-3'-phosphate
  modified_base 14: mod_base = OTHER; note = 2'-O-methylguanosine-3'-phosphate
  modified_base 15: mod_base = OTHER; note = 2'-O-methylcytidine-3'-phosphate
  modified_base 16: mod_base = OTHER; note = 2'-O-methyluridine-3'-phosphate
  modified_base 17: mod_base = OTHER; note = 2'-O-methyluridine-3'-phosphate
  modified_base 18: mod_base = OTHER; note = 2'-O-methyluridine-3'-phosphate
  modified_base 19: mod_base = OTHER; note = 2'-O-methyluridine-3'-phosphate
  modified_base 20: mod_base = OTHER; note = 2'-O-methylguanosine-3'-phosphate
  modified_base 21: mod_base = OTHER; note = 2'-O-methyluridine
  misc_feature 1..10: note = RNA
  misc_feature 11: note = DNA
  misc_feature 12..21: note = RNA
ctagacctgttttgcttttgt

SEQ ID NO: 795 - DNA, 21 bp, synthetic construct
  source 1..21: mol_type = other DNA
  modified_base 1: mod_base = OTHER; note = 2'-O-methylcytidine-3'-phosphorothioate
  modified_base 2: mod_base = OTHER; note = 2'-O-methyluridine-3'-phosphorothioate
  modified_base 3: mod_base = OTHER; note = 2'-O-methyladenosine-3'-phosphate
  modified_base 4: mod_base = OTHER; note = 2'-O-methylguanosine-3'-phosphate
  modified_base 5: mod_base = OTHER; note = 2'-O-methyladenosine-3'-phosphate
  modified_base 6: mod_base = OTHER; note = 2'-O-methylcytidine-3'-phosphate
  modified_base 7: mod_base = OTHER; note = 2'-fluorocytidine-3'-phosphate
  modified_base 8: mod_base = OTHER; note = 2'-O-methyluridine-3'-phosphate
  modified_base 9: mod_base = OTHER; note = 2'-fluoroguanosine-3'-phosphate
  modified_base 10: mod_base = OTHER; note = 2'-fluorouridine-3'-phosphate
  modified_base 12: mod_base = OTHER; note = 2'-O-methyluridine-3'-phosphate
  modified_base 13: mod_base = OTHER; note = 2'-O-methyluridine-3'-phosphate
  modified_base 14: mod_base = OTHER; note = 2'-O-methylguanosine-3'-phosphate
  modified_base 15: mod_base = OTHER; note = 2'-O-methylcytidine-3'-phosphate
  modified_base 16: mod_base = OTHER; note = 2'-O-methyluridine-3'-phosphate
  modified_base 17: mod_base = OTHER; note = 2'-O-methyluridine-3'-phosphate
  modified_base 18: mod_base = OTHER; note = 2'-O-methyluridine-3'-phosphate
  modified_base 19: mod_base = OTHER; note = 2'-O-methyluridine-3'-phosphate
  modified_base 20: mod_base = OTHER; note = 2'-O-methylguanosine-3'-phosphate
  modified_base 21: mod_base = OTHER; note = 2'-O-methyluridine
  misc_feature 1..10: note = RNA
  misc_feature 11: note = DNA
  misc_feature 12..21: note = RNA
ctagacctgttttgcttttgt

SEQ ID NO: 796 - DNA, 21 bp, synthetic construct
  source 1..21: mol_type = other DNA
  modified_base 1: mod_base = OTHER; note 2'-O-methoxyethyl(MOE)-5-methylcytidine-3'-phosphorothioate
  modified_base 2: mod_base = OTHER; note = 2'-O-methoxyethyl(MOE)-thymidine(or 5-methyluridine)-3'- phosphorothioate
  modified_base 3: mod_base = OTHER; note = 2'-O-methyladenosine-3'-phosphate
  modified_base 4: mod_base = OTHER; note = 2'-O-methylguanosine-3'-phosphate
  modified_base 5: mod_base = OTHER; note = 2'-O-methyladenosine-3'-phosphate
  modified_base 6: mod_base = OTHER; note = 2'-O-methylcytidine-3'-phosphate
  modified_base 7: mod_base = OTHER; note = 2'-fluorocytidine-3'-phosphate
  modified_base 8: mod_base = OTHER; note = 2'-O-methyluridine-3'-phosphate
  modified_base 9: mod_base = OTHER; note = 2'-fluoroguanosine-3'-phosphate
  modified_base 10: mod_base = OTHER; note = 2'-fluorouridine-3'-phosphate
  modified_base 12: mod_base = OTHER; note = 2'-O-methyluridine-3'-phosphate
  modified_base 13: mod_base = OTHER; note = 2'-O-methyluridine-3'-phosphate
  modified_base 14: mod_base = OTHER; note = 2'-O-methylguanosine-3'-phosphate
  modified_base 15: mod_base = OTHER; note = 2'-O-methylcytidine-3'-phosphate
  modified_base 16: mod_base = OTHER; note = 2'-O-methyluridine-3'-phosphate
  modified_base 17: mod_base = OTHER; note = 2'-O-methyluridine-3'-phosphate
  modified_base 18: mod_base = OTHER; note = 2'-O-methyluridine-3'-phosphate
  modified_base 19: mod_base = OTHER; note = 2'-O-methyluridine-3'-phosphate
  modified_base 20: mod_base = OTHER; note = 2'-O-methoxyethyl(MOE) guanosine-3'-phosphate
  modified_base 21: mod_base = OTHER; note = 2'-O-methoxyethyl(MOE)-thymidine(or 5-methyluridine)
  misc_feature 1..10: note = RNA
  misc_feature 11: note = DNA
  misc_feature 12..21: note = RNA
ctagacctgttttgcttttgt

SEQ ID NO: 797 - DNA, 21 bp, synthetic construct
  source 1..21: mol_type = other DNA
  modified_base 1: mod_base = OTHER; note 2'-O-methoxyethyl(MOE)-5-methylcytidine-3'-phosphorothioate
  modified_base 2: mod_base = OTHER; note = 2'-O-methoxyethyl(MOE)-thymidine(or 5-methyluridine)-3'- phosphorothioate
  modified_base 3: mod_base = OTHER; note = 2'-O-methyladenosine-3'-phosphate
  modified_base 4: mod_base = OTHER; note = 2'-O-methylguanosine-3'-phosphate
  modified_base 5: mod_base = OTHER; note = 2'-O-methyladenosine-3'-phosphate
  modified_base 6: mod_base = OTHER; note = 2'-O-methylcytidine-3'-phosphate
  modified_base 7: mod_base = OTHER; note = 2'-fluorocytidine-3'-phosphate
  modified_base 8: mod_base = OTHER; note = 2'-O-methyluridine-3'-phosphate
  modified_base 9: mod_base = OTHER; note = 2'-fluoroguanosine-3'-phosphate
  modified_base 10: mod_base = OTHER; note = 2'-fluorouridine-3'-phosphate
  modified_base 12: mod_base = OTHER; note = 2'-O-methyluridine-3'-phosphate
  modified_base 13: mod_base = OTHER; note = 2'-O-methyluridine-3'-phosphate
  modified_base 14: mod_base = OTHER; note = 2'-O-methylguanosine-3'-phosphate
  modified_base 15: mod_base = OTHER; note = 2'-O-methylcytidine-3'-phosphate
  modified_base 16: mod_base = OTHER; note = 2'-O-methyluridine-3'-phosphate
  modified_base 17: mod_base = OTHER; note = 2'-O-methyluridine-3'-phosphate
  modified_base 18: mod_base = OTHER; note = 2'-O-methyluridine-3'-phosphate
  modified_base 19: mod_base = OTHER; note = 2'-O-methyluridine-3'-phosphate
  modified_base 20: mod_base = OTHER; note = 2'-O-methoxyethyl(MOE) guanosine-3'-phosphate
  modified_base 21: mod_base = OTHER; note = 2'-O-methoxyethyl(MOE)-thymidine(or 5-methyluridine)
  misc_feature 1..10: note = RNA
  misc_feature 11: note = DNA
  misc_feature 12..21: note = RNA
ctagacctgttttgcttttgt

SEQ ID NO: 798 - DNA, 21 bp, synthetic construct
  source 1..21: mol_type = other DNA
  modified_base 1: mod_base = OTHER; note 2'-O-methoxyethyl(MOE)-5-methylcytidine-3'-phosphorothioate
  modified_base 2: mod_base = OTHER; note = 2'-O-methoxyethyl(MOE)-thymidine(or 5-methyluridine)-3'- phosphorothioate
  modified_base 3: mod_base = OTHER; note = 2'-O-methyladenosine-3'-phosphate
  modified_base 4: mod_base = OTHER; note = 2'-O-methylguanosine-3'-phosphate
  modified_base 5: mod_base = OTHER; note = 2'-O-methyladenosine-3'-phosphate
  modified_base 6: mod_base = OTHER; note = 2'-O-methylcytidine-3'-phosphate
  modified_base 7: mod_base = OTHER; note = 2'-fluorocytidine-3'-phosphate
  modified_base 8: mod_base = OTHER; note = 2'-O-methyluridine-3'-phosphate
  modified_base 9: mod_base = OTHER; note = 2'-fluoroguanosine-3'-phosphate
  modified_base 10: mod_base = OTHER; note = 2'-fluorouridine-3'-phosphate
  modified_base 12: mod_base = OTHER; note = 2'-O-methyluridine-3'-phosphate
  modified_base 13: mod_base = OTHER; note = 2'-O-methyluridine-3'-phosphate
  modified_base 14: mod_base = OTHER; note = 2'-O-methylguanosine-3'-phosphate
  modified_base 15: mod_base = OTHER; note = 2'-O-methylcytidine-3'-phosphate
  modified_base 16: mod_base = OTHER; note = 2'-O-methyluridine-3'-phosphate
  modified_base 17: mod_base = OTHER; note = 2'-O-methyluridine-3'-phosphate
  modified_base 18: mod_base = OTHER; note = 2'-O-methyluridine-3'-phosphate
  modified_base 19: mod_base = OTHER; note = 2'-O-methyluridine-3'-phosphate
  modified_base 20: mod_base = OTHER; note = 2'-O-methoxyethyl(MOE) guanosine-3'-phosphate
  modified_base 21: mod_base = OTHER; note = 2'-O-methoxyethyl(MOE) adenosine
  misc_feature 1..10: note = RNA
  misc_feature 11: note = DNA
  misc_feature 12..21: note = RNA
ctagacctgttttgcttttga

SEQ ID NO: 799 - DNA, 21 bp, synthetic construct
  source 1..21: mol_type = other DNA
  modified_base 1: mod_base = OTHER; note = 2'-O-methylcytidine-3'-phosphorothioate
  modified_base 2: mod_base = OTHER; note = 2'-O-methyluridine-3'-phosphorothioate
  modified_base 3: mod_base = OTHER; note = 2'-O-methyladenosine-3'-phosphate
  modified_base 4: mod_base = OTHER; note = 2'-O-methylguanosine-3'-phosphate
  modified_base 5: mod_base = OTHER; note = 2'-O-methyladenosine-3'-phosphate
  modified_base 6: mod_base = OTHER; note = 2'-O-methylcytidine-3'-phosphate
  modified_base 7: mod_base = OTHER; note = 2'-fluorocytidine-3'-phosphate
  modified_base 8: mod_base = OTHER; note = 2'-O-methyluridine-3'-phosphate
  modified_base 9: mod_base = OTHER; note = 2'-fluoroguanosine-3'-phosphate
  modified_base 10: mod_base = OTHER; note = 2'-O-methyluridine-3'-phosphate
  modified_base 12: mod_base = OTHER; note = 2'-O-methyluridine-3'-phosphate
  modified_base 13: mod_base = OTHER; note = 2'-O-methyluridine-3'-phosphate
  modified_base 14: mod_base = OTHER; note = 2'-O-methylguanosine-3'-phosphate
  modified_base 15: mod_base = OTHER; note = 2'-O-methylcytidine-3'-phosphate
  modified_base 16: mod_base = OTHER; note = 2'-O-methyluridine-3'-phosphate
  modified_base 17: mod_base = OTHER; note = 2'-O-methyluridine-3'-phosphate
  modified_base 18: mod_base = OTHER; note = 2'-O-methyluridine-3'-phosphate
  modified_base 19: mod_base = OTHER; note = 2'-O-methyluridine-3'-phosphate
  modified_base 20: mod_base = OTHER; note = 2'-O-methylguanosine-3'-phosphate
  modified_base 21: mod_base = OTHER; note = 2'-O-methyluridine
  misc_feature 1..10: note = RNA
  misc_feature 11: note = DNA
  misc_feature 12..21: note = RNA
ctagacctgttttgcttttgt

SEQ ID NO: 800 - DNA, 21 bp, synthetic construct
  source 1..21: mol_type = other DNA
  modified_base 1: mod_base = OTHER; note 2'-O-methoxyethyl(MOE)-5-methylcytidine-3'-phosphorothioate
  modified_base 2: mod_base = OTHER; note = 2'-O-methoxyethyl(MOE)-thymidine(or 5-methyluridine)-3'- phosphorothioate
  modified_base 3: mod_base = OTHER; note = 2'-O-methyladenosine-3'-phosphate
  modified_base 4: mod_base = OTHER; note = 2'-O-methylguanosine-3'-phosphate
  modified_base 5: mod_base = OTHER; note = 2'-O-methyladenosine-3'-phosphate
  modified_base 6: mod_base = OTHER; note = 2'-O-methylcytidine-3'-phosphate
  modified_base 7: mod_base = OTHER; note = 2'-fluorocytidine-3'-phosphate
  modified_base 8: mod_base = OTHER; note = 2'-O-methyluridine-3'-phosphate
  modified_base 9: mod_base = OTHER; note = 2'-fluoroguanosine-3'-phosphate
  modified_base 10: mod_base = OTHER; note = 2'-fluorouridine-3'-phosphate
  modified_base 12: mod_base = OTHER; note = 2'-O-methyluridine-3'-phosphate
  modified_base 13: mod_base = OTHER; note = 2'-O-methyluridine-3'-phosphate
  modified_base 14: mod_base = OTHER; note = 2'-O-methylguanosine-3'-phosphate
  modified_base 15: mod_base = OTHER; note = 2'-O-methylcytidine-3'-phosphate
  modified_base 16: mod_base = OTHER; note = 2'-O-methyluridine-3'-phosphate
  modified_base 17: mod_base = OTHER; note = 2'-O-methyluridine-3'-phosphate
  modified_base 18: mod_base = OTHER; note = 2'-O-methyluridine-3'-phosphate
  modified_base 19: mod_base = OTHER; note = 2'-O-methyluridine-3'-phosphate
  modified_base 20: mod_base = OTHER; note = 2'-O-methoxyethyl(MOE) guanosine-3'-phosphate
  modified_base 21: mod_base = OTHER; note = 2'-O-methoxyethyl(MOE)-thymidine(or 5-methyluridine)
  misc_feature 1..10: note = RNA
  misc_feature 11: note = DNA
  misc_feature 12..21: note = RNA
ctagacctgttttgcttttgt

SEQ ID NO: 801 - DNA, 21 bp, synthetic construct
  source 1..21: mol_type = other DNA
  modified_base 1: mod_base = OTHER; note 2'-O-methoxyethyl(MOE)-5-methylcytidine-3'-phosphorothioate
  modified_base 2: mod_base = OTHER; note = 2'-O-methoxyethyl(MOE)-thymidine(or 5-methyluridine)-3'- phosphorothioate
  modified_base 3: mod_base = OTHER; note = 2'-O-methyladenosine-3'-phosphate
  modified_base 4: mod_base = OTHER; note = 2'-O-methylguanosine-3'-phosphate
  modified_base 5: mod_base = OTHER; note = 2'-O-methyladenosine-3'-phosphate
  modified_base 6: mod_base = OTHER; note = 2'-O-methylcytidine-3'-phosphate
  modified_base 7: mod_base = OTHER; note = 2'-fluorocytidine-3'-phosphate
  modified_base 8: mod_base = OTHER; note = 2'-O-methyluridine-3'-phosphate
  modified_base 9: mod_base = OTHER; note = 2'-fluoroguanosine-3'-phosphate
  modified_base 10: mod_base = OTHER; note = 2'-fluorouridine-3'-phosphate
  modified_base 12: mod_base = OTHER; note = 2'-O-methyluridine-3'-phosphate
  modified_base 13: mod_base = OTHER; note = 2'-O-methyluridine-3'-phosphate
  modified_base 14: mod_base = OTHER; note = 2'-O-methylguanosine-3'-phosphate
  modified_base 15: mod_base = OTHER; note = 2'-O-methylcytidine-3'-phosphate
  modified_base 16: mod_base = OTHER; note = 2'-O-methyluridine-3'-phosphate
  modified_base 17: mod_base = OTHER; note = 2'-O-methyluridine-3'-phosphate
  modified_base 18: mod_base = OTHER; note = 2'-O-methyluridine-3'-phosphate
  modified_base 19: mod_base = OTHER; note = 2'-O-methyluridine-3'-phosphate
  modified_base 20: mod_base = OTHER; note = 2'-O-methoxyethyl(MOE) guanosine-3'-phosphate
  modified_base 21: mod_base = OTHER; note = 2'-O-methoxyethyl(MOE)-thymidine(or 5-methyluridine)
  misc_feature 1..10: note = RNA
  misc_feature 11: note = DNA
  misc_feature 12..21: note = RNA
ctagacctgttttgcttttgt

SEQ ID NO: 802 - DNA, 21 bp, synthetic construct
  source 1..21: mol_type = other DNA
  modified_base 1: mod_base = OTHER; note = 2'-O-methylcytidine-3'-phosphorothioate
  modified_base 2: mod_base = OTHER; note = 2'-O-methyluridine-3'-phosphorothioate
  modified_base 3: mod_base = OTHER; note = 2'-O-methyladenosine-3'-phosphate
  modified_base 4: mod_base = OTHER; note = 2'-O-methylguanosine-3'-phosphate
  modified_base 5: mod_base = OTHER; note = 2'-O-methyladenosine-3'-phosphate
  modified_base 6: mod_base = OTHER; note = 2'-O-methylcytidine-3'-phosphate
  modified_base 7: mod_base = OTHER; note = 2'-fluorocytidine-3'-phosphate
  modified_base 8: mod_base = OTHER; note = 2'-O-methyluridine-3'-phosphate
  modified_base 9: mod_base = OTHER; note = 2'-fluoroguanosine-3'-phosphate
  modified_base 10: mod_base = OTHER; note = 2'-fluorouridine-3'-phosphate
  modified_base 12: mod_base = OTHER; note = 2'-O-methyluridine-3'-phosphate
  modified_base 13: mod_base = OTHER; note = 2'-O-methyluridine-3'-phosphate
  modified_base 14: mod_base = OTHER; note = 2'-O-methylguanosine-3'-phosphate
  modified_base 15: mod_base = OTHER; note = 2'-O-methylcytidine-3'-phosphate
  modified_base 16: mod_base = OTHER; note = 2'-O-methyluridine-3'-phosphate
  modified_base 17: mod_base = OTHER; note = 2'-O-methyluridine-3'-phosphate
  modified_base 18: mod_base = OTHER; note = 2'-O-methyluridine-3'-phosphate
  modified_base 19: mod_base = OTHER; note = 2'-O-methyluridine-3'-phosphate
  modified_base 20: mod_base = OTHER; note = 2'-O-methylguanosine-3'-phosphate
  modified_base 21: mod_base = OTHER; note = 2'-O-methyluridine
  misc_feature 1..10: note = RNA
  misc_feature 11: note = DNA
  misc_feature 12..21: note = RNA
ctagacctgttttgcttttgt

SEQ ID NO: 803 - DNA, 21 bp, synthetic construct
  source 1..21: mol_type = other DNA
  modified_base 1: mod_base = OTHER; note 2'-O-methoxyethyl(MOE)-5-methylcytidine-3'-phosphorothioate
  modified_base 2: mod_base = OTHER; note = 2'-O-methoxyethyl(MOE)-thymidine(or 5-methyluridine)-3'- phosphorothioate
  modified_base 3: mod_base = OTHER; note = 2'-O-methyladenosine-3'-phosphate
  modified_base 4: mod_base = OTHER; note = 2'-O-methylguanosine-3'-phosphate
  modified_base 5: mod_base = OTHER; note = 2'-O-methyladenosine-3'-phosphate
  modified_base 6: mod_base = OTHER; note = 2'-O-methylcytidine-3'-phosphate
  modified_base 7: mod_base = OTHER; note = 2'-fluorocytidine-3'-phosphate
  modified_base 8: mod_base = OTHER; note = 2'-O-methyluridine-3'-phosphate
  modified_base 9: mod_base = OTHER; note = 2'-fluoroguanosine-3'-phosphate
  modified_base 10: mod_base = OTHER; note = 2'-fluorouridine-3'-phosphate
  modified_base 12: mod_base = OTHER; note = 2'-O-methyluridine-3'-phosphate
  modified_base 13: mod_base = OTHER; note = 2'-O-methyluridine-3'-phosphate
  modified_base 14: mod_base = OTHER; note = 2'-O-methylguanosine-3'-phosphate
  modified_base 15: mod_base = OTHER; note = 2'-O-methylcytidine-3'-phosphate
  modified_base 16: mod_base = OTHER; note = 2'-O-methyluridine-3'-phosphate
  modified_base 17: mod_base = OTHER; note = 2'-O-methyluridine-3'-phosphate
  modified_base 18: mod_base = OTHER; note = 2'-O-methyluridine-3'-phosphate
  modified_base 19: mod_base = OTHER; note = 2'-O-methyluridine-3'-phosphate
  modified_base 20: mod_base = OTHER; note = 2'-O-methoxyethyl(MOE) guanosine-3'-phosphate
  modified_base 21: mod_base = OTHER; note = 2'-O-methoxyethyl(MOE) adenosine
  misc_feature 1..10: note = RNA
  misc_feature 11: note = DNA
  misc_feature 12..21: note = RNA
ctagacctgttttgcttttga

SEQ ID NO: 804 - DNA, 21 bp, synthetic construct
  source 1..21: mol_type = other DNA
  modified_base 1: mod_base = OTHER; note 2'-O-methoxyethyl(MOE)-5-methylcytidine-3'-phosphorothioate
  modified_base 2: mod_base = OTHER; note = 2'-O-methoxyethyl(MOE)-thymidine(or 5-methyluridine)-3'- phosphorothioate
  modified_base 3: mod_base = OTHER; note = 2'-O-methyladenosine-3'-phosphate
  modified_base 4: mod_base = OTHER; note = 2'-O-methylguanosine-3'-phosphate
  modified_base 5: mod_base = OTHER; note = 2'-O-methyladenosine-3'-phosphate
  modified_base 6: mod_base = OTHER; note = 2'-O-methylcytidine-3'-phosphate
  modified_base 7: mod_base = OTHER; note = 2'-fluorocytidine-3'-phosphate
  modified_base 8: mod_base = OTHER; note = 2'-O-methyluridine-3'-phosphate
  modified_base 9: mod_base = OTHER; note = 2'-fluoroguanosine-3'-phosphate
  modified_base 10: mod_base = OTHER; note = 2'-fluorouridine-3'-phosphate
  modified_base 12: mod_base = OTHER; note = 2'-O-methyluridine-3'-phosphate
  modified_base 13: mod_base = OTHER; note = 2'-O-methyluridine-3'-phosphate
  modified_base 14: mod_base = OTHER; note = 2'-O-methylguanosine-3'-phosphate
  modified_base 15: mod_base = OTHER; note = 2'-O-methylcytidine-3'-phosphate
  modified_base 16: mod_base = OTHER; note = 2'-O-methyluridine-3'-phosphate
  modified_base 17: mod_base = OTHER; note = 2'-O-methyluridine-3'-phosphate
  modified_base 18: mod_base = OTHER; note = 2'-O-methyluridine-3'-phosphate
  modified_base 19: mod_base = OTHER; note = 2'-O-methyluridine-3'-phosphorothioate
  modified_base 20: mod_base = OTHER; note = 2'-O-methoxyethyl(MOE) guanosine-3'-phosphorothioate
  modified_base 21: mod_base = OTHER; note = 2'-O-methoxyethyl(MOE) adenosine
  misc_feature 1..10: note = RNA
  misc_feature 11: note = DNA
  misc_feature 12..21: note = RNA
ctagacctgttttgcttttga

SEQ ID NO: 805 - RNA, 21 nt, synthetic construct
  source 1..21: mol_type = other RNA
  modified_base 1: mod_base = OTHER; note 2'-O-methoxyethyl(MOE)-5-methylcytidine-3'-phosphorothioate
  modified_base 2: mod_base = OTHER; note = 2'-O-methoxyethyl(MOE)-thymidine(or 5-methyluridine)-3'- phosphorothioate
  modified_base 3: mod_base = OTHER; note = 2'-O-methyladenosine-3'-phosphate
  modified_base 4: mod_base = OTHER; note = 2'-O-methylguanosine-3'-phosphate
  modified_base 5: mod_base = OTHER; note = 2'-O-methyladenosine-3'-phosphate
  modified_base 6: mod_base = OTHER; note = 2'-O-methylcytidine-3'-phosphate
  modified_base 7: mod_base = OTHER; note = 2'-fluorocytidine-3'-phosphate
  modified_base 8: mod_base = OTHER; note = 2'-O-methyluridine-3'-phosphate
  modified_base 9: mod_base = OTHER; note = 2'-fluoroguanosine-3'-phosphate
  modified_base 10: mod_base = OTHER; note = 2'-fluorouridine-3'-phosphate
  modified_base 11: mod_base = OTHER; note = 2'-fluorouridine-3'-phosphate
  modified_base 12: mod_base = OTHER; note = 2'-O-methyluridine-3'-phosphate
  modified_base 13: mod_base = OTHER; note = 2'-O-methyluridine-3'-phosphate
  modified_base 14: mod_base = OTHER; note = 2'-O-methylguanosine-3'-phosphate
  modified_base 15: mod_base = OTHER; note = 2'-O-methylcytidine-3'-phosphate
  modified_base 16: mod_base = OTHER; note = 2'-O-methyluridine-3'-phosphate
  modified_base 17: mod_base = OTHER; note = 2'-O-methyluridine-3'-phosphate
  modified_base 18: mod_base = OTHER; note = 2'-O-methyluridine-3'-phosphate
  modified_base 19: mod_base = OTHER; note = 2'-O-methyluridine-3'-phosphate
  modified_base 20: mod_base = OTHER; note = 2'-O-methoxyethyl(MOE) guanosine-3'-phosphate
  modified_base 21: mod_base = OTHER; note = 2'-O-methoxyethyl(MOE)-thymidine(or 5-methyluridine)
ctagacctgttttgcttttgt

SEQ ID NO: 806 - DNA, 21 bp, synthetic construct
  source 1..21: mol_type = other DNA
  modified_base 1: mod_base = OTHER; note 2'-O-methoxyethyl(MOE)-5-methylcytidine-3'-phosphorothioate
  modified_base 2: mod_base = OTHER; note = 2'-O-methoxyethyl(MOE)-thymidine(or 5-methyluridine)-3'- phosphorothioate
  modified_base 3: mod_base = OTHER; note = 2'-O-methyladenosine-3'-phosphate
  modified_base 4: mod_base = OTHER; note = 2'-O-methylguanosine-3'-phosphate
  modified_base 5: mod_base = OTHER; note = 2'-O-methyladenosine-3'-phosphate
  modified_base 6: mod_base = OTHER; note = 2'-O-methylcytidine-3'-phosphate
  modified_base 7: mod_base = OTHER; note = 2'-fluorocytidine-3'-phosphate
  modified_base 8: mod_base = OTHER; note = 2'-O-methyluridine-3'-phosphate
  modified_base 9: mod_base = OTHER; note = 2'-fluoroguanosine-3'-phosphate
  modified_base 10: mod_base = OTHER; note = 2'-fluorouridine-3'-phosphate
  modified_base 12: mod_base = OTHER; note = 2'-O-methyluridine-3'-phosphate
  modified_base 13: mod_base = OTHER; note = 2'-O-methyluridine-3'-phosphate
  modified_base 14: mod_base = OTHER; note = 2'-O-methylguanosine-3'-phosphate
  modified_base 15: mod_base = OTHER; note = 2'-O-methylcytidine-3'-phosphate
  modified_base 16: mod_base = OTHER; note = 2'-O-methyluridine-3'-phosphate
  modified_base 17: mod_base = OTHER; note = 2'-O-methyluridine-3'-phosphate
  modified_base 18: mod_base = OTHER; note = 2'-O-methyluridine-3'-phosphate
  modified_base 19: mod_base = OTHER; note = 2'-O-methyluridine-3'-phosphorothioate
  modified_base 20: mod_base = OTHER; note = 2'-O-methoxyethyl(MOE) guanosine-3'-phosphorothioate
  modified_base 21: mod_base = OTHER; note = 2'-O-methoxyethyl(MOE)-thymidine(or 5-methyluridine)
  misc_feature 1..10: note = RNA
  misc_feature 11: note = DNA
  misc_feature 12..21: note = RNA
ctagacctgttttgcttttgt

SEQ ID NO: 807 - RNA, 21 nt, synthetic construct
  source 1..21: mol_type = other RNA
  modified_base 1: mod_base = OTHER; note 2'-O-methoxyethyl(MOE)-5-methylcytidine-3'-phosphorothioate
  modified_base 2: mod_base = OTHER; note = 2'-O-methoxyethyl(MOE)-thymidine(or 5-methyluridine)-3'- phosphorothioate
  modified_base 3: mod_base = OTHER; note = 2'-O-methyladenosine-3'-phosphate
  modified_base 4: mod_base = OTHER; note = 2'-O-methylguanosine-3'-phosphate
  modified_base 5: mod_base = OTHER; note = 2'-O-methyladenosine-3'-phosphate
  modified_base 6: mod_base = OTHER; note = 2'-O-methylcytidine-3'-phosphate
  modified_base 7: mod_base = OTHER; note = 2'-fluorocytidine-3'-phosphate
  modified_base 8: mod_base = OTHER; note = 2'-O-methyluridine-3'-phosphate
  modified_base 9: mod_base = OTHER; note = 2'-fluoroguanosine-3'-phosphate
  modified_base 10: mod_base = OTHER; note = 2'-fluorouridine-3'-phosphate
  modified_base 11: mod_base = OTHER; note = 2'-fluorouridine-3'-phosphate
  modified_base 12: mod_base = OTHER; note = 2'-O-methyluridine-3'-phosphate
  modified_base 13: mod_base = OTHER; note = 2'-O-methyluridine-3'-phosphate
  modified_base 14: mod_base = OTHER; note = 2'-O-methylguanosine-3'-phosphate
  modified_base 15: mod_base = OTHER; note = 2'-O-methylcytidine-3'-phosphate
  modified_base 16: mod_base = OTHER; note = 2'-O-methyluridine-3'-phosphate
  modified_base 17: mod_base = OTHER; note = 2'-O-methyluridine-3'-phosphate
  modified_base 18: mod_base = OTHER; note = 2'-O-methyluridine-3'-phosphate
  modified_base 19: mod_base = OTHER; note = 2'-O-methyluridine-3'-phosphorothioate
  modified_base 20: mod_base = OTHER; note = 2'-O-methoxyethyl(MOE) guanosine-3'-phosphorothioate
  modified_base 21: mod_base = OTHER; note = 2'-O-methoxyethyl(MOE)-thymidine(or 5-methyluridine)
ctagacctgttttgcttttgt

SEQ ID NO: 808 - DNA, 21 bp, synthetic construct
  source 1..21: mol_type = other DNA
  modified_base 1: mod_base = OTHER; note 2'-O-methoxyethyl(MOE)-5-methylcytidine-3'-phosphorothioate
  modified_base 2: mod_base = OTHER; note = 2'-O-methoxyethyl(MOE)-thymidine(or 5-methyluridine)-3'- phosphorothioate
  modified_base 3: mod_base = OTHER; note = 2'-O-methyladenosine-3'-phosphate
  modified_base 4: mod_base = OTHER; note = 2'-O-methylguanosine-3'-phosphate
  modified_base 5: mod_base = OTHER; note = 2'-O-methyladenosine-3'-phosphate
  modified_base 6: mod_base = OTHER; note = 2'-O-methylcytidine-3'-phosphate
  modified_base 7: mod_base = OTHER; note = 2'-fluorocytidine-3'-phosphate
  modified_base 8: mod_base = OTHER; note = 2'-O-methyluridine-3'-phosphate
  modified_base 9: mod_base = OTHER; note = 2'-fluoroguanosine-3'-phosphate
  modified_base 10: mod_base = OTHER; note = 2'-fluorouridine-3'-phosphate
  modified_base 12: mod_base = OTHER; note = 2'-O-methyluridine-3'-phosphate
  modified_base 13: mod_base = OTHER; note = 2'-O-methyluridine-3'-phosphate
  modified_base 14: mod_base = OTHER; note = 2'-O-methylguanosine-3'-phosphate
  modified_base 15: mod_base = OTHER; note = 2'-O-methylcytidine-3'-phosphate
  modified_base 16: mod_base = OTHER; note = 2'-O-methyluridine-3'-phosphate
  modified_base 17: mod_base = OTHER; note = 2'-O-methyluridine-3'-phosphate
  modified_base 18: mod_base = OTHER; note = 2'-O-methyluridine-3'-phosphate
  modified_base 19: mod_base = OTHER; note = 2'-O-methyluridine-3'-phosphorothioate
  modified_base 20: mod_base = OTHER; note = 2'-O-methoxyethyl(MOE) guanosine-3'-phosphorothioate
  modified_base 21: mod_base = OTHER; note = 2'-O-methoxyethyl(MOE)-thymidine(or 5-methyluridine)
  misc_feature 1..10: note = RNA
  misc_feature 11: note = DNA
  misc_feature 12..21: note = RNA
ctagacctgttttgcttttgt

SEQ ID NO: 809 - RNA, 21 nt, synthetic construct
  source 1..21: mol_type = other RNA
  modified_base 1: mod_base = OTHER; note 2'-O-methoxyethyl(MOE)-5-methylcytidine-3'-phosphorothioate
  modified_base 2: mod_base = OTHER; note = 2'-O-methoxyethyl(MOE)-thymidine(or 5-methyluridine)-3'- phosphorothioate
  modified_base 3: mod_base = OTHER; note = 2'-O-methyladenosine-3'-phosphate
  modified_base 4: mod_base = OTHER; note = 2'-O-methylguanosine-3'-phosphate
  modified_base 5: mod_base = OTHER; note = 2'-O-methyladenosine-3'-phosphate
  modified_base 6: mod_base = OTHER; note = 2'-O-methylcytidine-3'-phosphate
  modified_base 7: mod_base = OTHER; note = 2'-fluorocytidine-3'-phosphate
  modified_base 8: mod_base = OTHER; note = 2'-O-methyluridine-3'-phosphate
  modified_base 9: mod_base = OTHER; note = 2'-fluoroguanosine-3'-phosphate
  modified_base 10: mod_base = OTHER; note = 2'-fluorouridine-3'-phosphate
  modified_base 11: mod_base = OTHER; note = 2'-fluorouridine-3'-phosphate
  modified_base 12: mod_base = OTHER; note = 2'-O-methyluridine-3'-phosphate
  modified_base 13: mod_base = OTHER; note = 2'-O-methyluridine-3'-phosphate
  modified_base 14: mod_base = OTHER; note = 2'-O-methylguanosine-3'-phosphate
  modified_base 15: mod_base = OTHER; note = 2'-O-methylcytidine-3'-phosphate
  modified_base 16: mod_base = OTHER; note = 2'-O-methyluridine-3'-phosphate
  modified_base 17: mod_base = OTHER; note = 2'-O-methyluridine-3'-phosphate
  modified_base 18: mod_base = OTHER; note = 2'-O-methyluridine-3'-phosphate
  modified_base 19: mod_base = OTHER; note = 2'-O-methyluridine-3'-phosphorothioate
  modified_base 20: mod_base = OTHER; note = 2'-O-methoxyethyl(MOE) guanosine-3'-phosphorothioate
  modified_base 21: mod_base = OTHER; note = 2'-O-methoxyethyl(MOE)-thymidine(or 5-methyluridine)
ctagacctgttttgcttttgt

SEQ ID NO: 810 - DNA, 21 bp, synthetic construct
  source 1..21: mol_type = other DNA
  modified_base 1: mod_base = OTHER; note 2'-O-methoxyethyl(MOE)-5-methylcytidine-3'-phosphorothioate
  modified_base 2: mod_base = OTHER; note = 2'-O-methoxyethyl(MOE)-thymidine(or 5-methyluridine)-3'- phosphorothioate
  modified_base 3: mod_base = OTHER; note = 2'-O-methyladenosine-3'-phosphate
  modified_base 4: mod_base = OTHER; note = 2'-O-methylguanosine-3'-phosphate
  modified_base 5: mod_base = OTHER; note = 2'-O-methyladenosine-3'-phosphate
  modified_base 6: mod_base = OTHER; note = 2'-O-methylcytidine-3'-phosphate
  modified_base 7: mod_base = OTHER; note = 2'-fluorocytidine-3'-phosphate
  modified_base 8: mod_base = OTHER; note = 2'-O-methyluridine-3'-phosphate
  modified_base 9: mod_base = OTHER; note = 2'-fluoroguanosine-3'-phosphate
  modified_base 10: mod_base = OTHER; note = 2'-fluorouridine-3'-phosphate
  modified_base 12: mod_base = OTHER; note = 2'-O-methyluridine-3'-phosphate
  modified_base 13: mod_base = OTHER; note = 2'-O-methyluridine-3'-phosphate
  modified_base 14: mod_base = OTHER; note = 2'-O-methylguanosine-3'-phosphate
  modified_base 15: mod_base = OTHER; note = 2'-O-methylcytidine-3'-phosphate
  modified_base 16: mod_base = OTHER; note = 2'-O-methyluridine-3'-phosphate
  modified_base 17: mod_base = OTHER; note = 2'-O-methyluridine-3'-phosphate
  modified_base 18: mod_base = OTHER; note = 2'-O-methyluridine-3'-phosphate
  modified_base 19: mod_base = OTHER; note = 2'-O-methyluridine-3'-phosphate
  modified_base 20: mod_base = OTHER; note = 2'-O-methoxyethyl(MOE) guanosine-3'-phosphate
  modified_base 21: mod_base = OTHER; note = 2'-O-methoxyethyl(MOE)-thymidine(or 5-methyluridine)
  misc_feature 1..10: note = RNA
  misc_feature 11: note = DNA
  misc_feature 12..21: note = RNA
ctagacctgttttgcttttgt

SEQ ID NO: 811 - DNA, 21 bp, synthetic construct
  source 1..21: mol_type = other DNA
  modified_base 1: mod_base = OTHER; note 2'-O-methoxyethyl(MOE)-5-methylcytidine-3'-phosphorothioate
  modified_base 2: mod_base = OTHER; note = 2'-O-methoxyethyl(MOE)-thymidine(or 5-methyluridine)-3'- phosphorothioate
  modified_base 3: mod_base = OTHER; note = 2'-O-methyladenosine-3'-phosphate
  modified_base 4: mod_base = OTHER; note = 2'-O-methylguanosine-3'-phosphate
  modified_base 5: mod_base = OTHER; note = 2'-O-methyladenosine-3'-phosphate
  modified_base 6: mod_base = OTHER; note = 2'-O-methylcytidine-3'-phosphate
  modified_base 7: mod_base = OTHER; note = 2'-fluorocytidine-3'-phosphate
  modified_base 8: mod_base = OTHER; note = 2'-O-methyluridine-3'-phosphate
  modified_base 9: mod_base = OTHER; note = 2'-fluoroguanosine-3'-phosphate
  modified_base 10: mod_base = OTHER; note = 2'-fluorouridine-3'-phosphate
  modified_base 12: mod_base = OTHER; note = 2'-O-methyluridine-3'-phosphate
  modified_base 13: mod_base = OTHER; note = 2'-O-methyluridine-3'-phosphate
  modified_base 14: mod_base = OTHER; note = 2'-O-methylguanosine-3'-phosphate
  modified_base 15: mod_base = OTHER; note = 2'-O-methylcytidine-3'-phosphate
  modified_base 16: mod_base = OTHER; note = 2'-O-methyluridine-3'-phosphate
  modified_base 17: mod_base = OTHER; note = 2'-O-methyluridine-3'-phosphate
  modified_base 18: mod_base = OTHER; note = 2'-O-methyluridine-3'-phosphate
  modified_base 19: mod_base = OTHER; note = 2'-O-methyluridine-3'-phosphorothioate
  modified_base 20: mod_base = OTHER; note = 2'-O-methoxyethyl(MOE) guanosine-3'-phosphorothioate
  modified_base 21: mod_base = OTHER; note = 2'-O-methoxyethyl(MOE)-thymidine(or 5-methyluridine)
  misc_feature 1..10: note = RNA
  misc_feature 11: note = DNA
  misc_feature 12..21: note = RNA
ctagacctgttttgcttttgt

SEQ ID NO: 812 - DNA, 21 bp, synthetic construct
  source 1..21: mol_type = other DNA
  modified_base 1: mod_base = OTHER; note = Cytosine threose nucleic acid-2'-phosphorothioate
  modified_base 2: mod_base = OTHER; note = Uracil threose nucleic acid-2'-phosphorothioate
  modified_base 3: mod_base = OTHER; note = 2'-O-methyladenosine-3'-phosphate
  modified_base 4: mod_base = OTHER; note = 2'-O-methylguanosine-3'-phosphate
  modified_base 5: mod_base = OTHER; note = 2'-O-methyladenosine-3'-phosphate
  modified_base 6: mod_base = OTHER; note = 2'-O-methylcytidine-3'-phosphate
  modified_base 7: mod_base = OTHER; note = 2'-fluorocytidine-3'-phosphate
  modified_base 8: mod_base = OTHER; note = 2'-O-methyluridine-3'-phosphate
  modified_base 9: mod_base = OTHER; note = 2'-fluoroguanosine-3'-phosphate
  modified_base 10: mod_base = OTHER; note = 2'-fluorouridine-3'-phosphate
  modified_base 12: mod_base = OTHER; note = 2'-O-methyluridine-3'-phosphate
  modified_base 13: mod_base = OTHER; note = 2'-O-methyluridine-3'-phosphate
  modified_base 14: mod_base = OTHER; note = 2'-O-methylguanosine-3'-phosphate
  modified_base 15: mod_base = OTHER; note = 2'-O-methylcytidine-3'-phosphate
  modified_base 16: mod_base = OTHER; note = 2'-O-methyluridine-3'-phosphate
  modified_base 17: mod_base = OTHER; note = 2'-O-methyluridine-3'-phosphate
  modified_base 18: mod_base = OTHER; note = 2'-O-methyluridine-3'-phosphate
  modified_base 19: mod_base = OTHER; note = 2'-O-methyluridine-3'-phosphate
  modified_base 20: mod_base = OTHER; note = Guanine threose nucleic acid-2'-phosphate
  modified_base 21: mod_base = OTHER; note = Uracil threose nucleic acid
  misc_feature 1..10: note = RNA
  misc_feature 11: note = DNA
  misc_feature 12..21: note = RNA
ctagacctgttttgcttttgt

SEQ ID NO: 813 - DNA, 21 bp, synthetic construct
  source 1..21: mol_type = other DNA
  modified_base 1: mod_base = OTHER; note = Cytosine threose nucleic acid-2'-phosphorothioate
  modified_base 2: mod_base = OTHER; note = Uracil threose nucleic acid-2'-phosphorothioate
  modified_base 3: mod_base = OTHER; note = 2'-O-methyladenosine-3'-phosphate
  modified_base 4: mod_base = OTHER; note = 2'-O-methylguanosine-3'-phosphate
  modified_base 5: mod_base = OTHER; note = 2'-O-methyladenosine-3'-phosphate
  modified_base 6: mod_base = OTHER; note = 2'-O-methylcytidine-3'-phosphate
  modified_base 7: mod_base = OTHER; note = 2'-fluorocytidine-3'-phosphate
  modified_base 8: mod_base = OTHER; note = 2'-O-methyluridine-3'-phosphate
  modified_base 9: mod_base = OTHER; note = 2'-fluoroguanosine-3'-phosphate
  modified_base 10: mod_base = OTHER; note = 2'-fluorouridine-3'-phosphate
  modified_base 12: mod_base = OTHER; note = 2'-O-methyluridine-3'-phosphate
  modified_base 13: mod_base = OTHER; note = 2'-O-methyluridine-3'-phosphate
  modified_base 14: mod_base = OTHER; note = 2'-O-methylguanosine-3'-phosphate
  modified_base 15: mod_base = OTHER; note = 2'-O-methylcytidine-3'-phosphate
  modified_base 16: mod_base = OTHER; note = 2'-O-methyluridine-3'-phosphate
  modified_base 17: mod_base = OTHER; note = 2'-O-methyluridine-3'-phosphate
  modified_base 18: mod_base = OTHER; note = 2'-O-methyluridine-3'-phosphate
  modified_base 19: mod_base = OTHER; note = 2'-O-methyluridine-3'-phosphorothioate
  modified_base 20: mod_base = OTHER; note = Guanine threose nucleic acid-2'-phosphorothioate
  modified_base 21: mod_base = OTHER; note = Uracil threose nucleic acid
  misc_feature 1..10: note = RNA
  misc_feature 11: note = DNA
  misc_feature 12..21: note = RNA
ctagacctgttttgcttttgt

SEQ ID NO: 814 - DNA, 21 bp, synthetic construct
  source 1..21: mol_type = other DNA
  modified_base 1: mod_base = OTHER; note = Cytosine threose nucleic acid-2'-phosphorothioate
  modified_base 2: mod_base = OTHER; note = Uracil threose nucleic acid-2'-phosphorothioate
  modified_base 3: mod_base = OTHER; note = 2'-O-methyladenosine-3'-phosphate
  modified_base 4: mod_base = OTHER; note = 2'-O-methylguanosine-3'-phosphate
  modified_base 5: mod_base = OTHER; note = 2'-O-methyladenosine-3'-phosphate
  modified_base 6: mod_base = OTHER; note = 2'-O-methylcytidine-3'-phosphate
  modified_base 7: mod_base = OTHER; note = 2'-fluorocytidine-3'-phosphate
  modified_base 8: mod_base = OTHER; note = 2'-O-methyluridine-3'-phosphate
  modified_base 9: mod_base = OTHER; note = 2'-fluoroguanosine-3'-phosphate
  modified_base 10: mod_base = OTHER; note = 2'-fluorouridine-3'-phosphate
  modified_base 12: mod_base = OTHER; note = 2'-O-methyluridine-3'-phosphate
  modified_base 13: mod_base = OTHER; note = 2'-O-methyluridine-3'-phosphate
  modified_base 14: mod_base = OTHER; note = 2'-O-methylguanosine-3'-phosphate
  modified_base 15: mod_base = OTHER; note = 2'-O-methylcytidine-3'-phosphate
  modified_base 16: mod_base = OTHER; note = 2'-O-methyluridine-3'-phosphate
  modified_base 17: mod_base = OTHER; note = 2'-O-methyluridine-3'-phosphate
  modified_base 18: mod_base = OTHER; note = 2'-O-methyluridine-3'-phosphate
  modified_base 19: mod_base = OTHER; note = 2'-O-methyluridine-3'-phosphate
  modified_base 20: mod_base = OTHER; note = Guanine threose nucleic acid-2'-phosphate
  modified_base 21: mod_base = OTHER; note = Uracil threose nucleic acid
  misc_feature 1..10: note = RNA
  misc_feature 11: note = DNA
  misc_feature 12..21: note = RNA
ctagacctgttttgcttttgt

SEQ ID NO: 815 - DNA, 21 bp, synthetic construct
  source 1..21: mol_type = other DNA
  modified_base 1: mod_base = OTHER; note = Cytosine threose nucleic acid-2'-phosphorothioate
  modified_base 2: mod_base = OTHER; note = Uracil threose nucleic acid-2'-phosphorothioate
  modified_base 3: mod_base = OTHER; note = 2'-O-methyladenosine-3'-phosphate
  modified_base 4: mod_base = OTHER; note = 2'-O-methylguanosine-3'-phosphate
  modified_base 5: mod_base = OTHER; note = 2'-O-methyladenosine-3'-phosphate
  modified_base 6: mod_base = OTHER; note = 2'-O-methylcytidine-3'-phosphate
  modified_base 7: mod_base = OTHER; note = 2'-fluorocytidine-3'-phosphate
  modified_base 8: mod_base = OTHER; note = 2'-O-methyluridine-3'-phosphate
  modified_base 9: mod_base = OTHER; note = 2'-fluoroguanosine-3'-phosphate
  modified_base 10: mod_base = OTHER; note = 2'-fluorouridine-3'-phosphate
  modified_base 12: mod_base = OTHER; note = 2'-O-methyluridine-3'-phosphate
  modified_base 13: mod_base = OTHER; note = 2'-O-methyluridine-3'-phosphate
  modified_base 14: mod_base = OTHER; note = 2'-O-methylguanosine-3'-phosphate
  modified_base 15: mod_base = OTHER; note = 2'-O-methylcytidine-3'-phosphate
  modified_base 16: mod_base = OTHER; note = 2'-O-methyluridine-3'-phosphate
  modified_base 17: mod_base = OTHER; note = 2'-O-methyluridine-3'-phosphate
  modified_base 18: mod_base = OTHER; note = 2'-O-methyluridine-3'-phosphate
  modified_base 19: mod_base = OTHER; note = 2'-O-methyluridine-3'-phosphorothioate
  modified_base 20: mod_base = OTHER; note = Guanine threose nucleic acid-2'-phosphorothioate
  modified_base 21: mod_base = OTHER; note = Uracil threose nucleic acid
  misc_feature 1..10: note = RNA
  misc_feature 11: note = DNA
  misc_feature 12..21: note = RNA
ctagacctgttttgcttttgt

SEQ ID NO: 816 - RNA, 21 nt, synthetic construct
  source 1..21: mol_type = other RNA
  modified_base 1: mod_base = OTHER; note 2'-O-methoxyethyl(MOE)-5-methylcytidine-3'-phosphorothioate
  modified_base 2: mod_base = OTHER; note = 2'-O-methoxyethyl(MOE) adenosine-3'-phosphorothioate
  modified_base 3: mod_base = OTHER; note = 2'-O-methyladenosine-3'-phosphate
  modified_base 4: mod_base = OTHER; note = 2'-O-methylguanosine-3'-phosphate
  modified_base 5: mod_base = OTHER; note = 2'-O-methylcytidine-3'-phosphate
  modified_base 6: mod_base = OTHER; note = 2'-O-methyladenosine-3'-phosphate
  modified_base 7: mod_base = OTHER; note = 2'-fluoroguanosine-3'-phosphate
  modified_base 8: mod_base = OTHER; note = 2'-O-methyladenosine-3'-phosphate
  modified_base 9: mod_base = OTHER; note = 2'-fluorocytidine-3'-phosphate
  modified_base 10: mod_base = OTHER; note = 2'-fluoroadenosine-3'-phosphate
  modified_base 11: mod_base = OTHER; note = 2'-fluorouridine-3'-phosphate
  modified_base 12: mod_base = OTHER; note = 2'-O-methyluridine-3'-phosphate
  modified_base 13: mod_base = OTHER; note = 2'-O-methyluridine-3'-phosphate
  modified_base 14: mod_base = OTHER; note = 2'-O-methyladenosine-3'-phosphate
  modified_base 15: mod_base = OTHER; note = 2'-O-methyluridine-3'-phosphate
  modified_base 16: mod_base = OTHER; note = 2'-O-methylcytidine-3'-phosphate
  modified_base 17: mod_base = OTHER; note = 2'-O-methyluridine-3'-phosphate
  modified_base 18: mod_base = OTHER; note = 2'-O-methyluridine-3'-phosphate
  modified_base 19: mod_base = OTHER; note = 2'-O-methyluridine-3'-phosphate
  modified_base 20: mod_base = OTHER; note = 2'-O-methoxyethyl(MOE)-thymidine(or 5-methyluridine)-3'-phosphate
  modified_base 21: mod_base = OTHER; note = 2'-O-methoxyethyl(MOE) adenosine
caagcagacatttatctttta

SEQ ID NO: 817 - RNA, 21 nt, synthetic construct
  source 1..21: mol_type = other RNA
  modified_base 1: mod_base = OTHER; note 2'-O-methoxyethyl(MOE)-5-methylcytidine-3'-phosphorothioate
  modified_base 2: mod_base = OTHER; note = 2'-O-methoxyethyl(MOE) adenosine-3'-phosphorothioate
  modified_base 3: mod_base = OTHER; note = 2'-O-methyladenosine-3'-phosphate
  modified_base 4: mod_base = OTHER; note = 2'-O-methylcytidine-3'-phosphate
  modified_base 5: mod_base = OTHER; note = 2'-O-methyluridine-3'-phosphate
  modified_base 6: mod_base = OTHER; note = 2'-O-methyluridine-3'-phosphate
  modified_base 7: mod_base = OTHER; note = 2'-fluorouridine-3'-phosphate
  modified_base 8: mod_base = OTHER; note = 2'-O-methyluridine-3'-phosphate
  modified_base 9: mod_base = OTHER; note = 2'-fluorocytidine-3'-phosphate
  modified_base 10: mod_base = OTHER; note = 2'-fluorouridine-3'-phosphate
  modified_base 11: mod_base = OTHER; note = 2'-fluoroadenosine-3'-phosphate
  modified_base 12: mod_base = OTHER; note = 2'-O-methylguanosine-3'-phosphate
  modified_base 13: mod_base = OTHER; note = 2'-O-methyladenosine-3'-phosphate
  modified_base 14: mod_base = OTHER; note = 2'-O-methylcytidine-3'-phosphate
  modified_base 15: mod_base = OTHER; note = 2'-O-methylcytidine-3'-phosphate
  modified_base 16: mod_base = OTHER; note = 2'-O-methyluridine-3'-phosphate
  modified_base 17: mod_base = OTHER; note = 2'-O-methylguanosine-3'-phosphate
  modified_base 18: mod_base = OTHER; note = 2'-O-methyluridine-3'-phosphate
  modified_base 19: mod_base = OTHER; note = 2'-O-methyluridine-3'-phosphate
  modified_base 20: mod_base = OTHER; note = 2'-O-methoxyethyl(MOE)-thymidine(or 5-methyluridine)-3'-phosphate
  modified_base 21: mod_base = OTHER; note = 2'-O-methoxyethyl(MOE)-thymidine(or 5-methyluridine)
caacttttctagacctgtttt

SEQ ID NO: 818 - RNA, 21 nt, synthetic construct
  source 1..21: mol_type = other RNA
  modified_base 1: mod_base = OTHER; note = 2'-O-methoxyethyl(MOE) guanosine-3'-phosphorothioate
  modified_base 2: mod_base = OTHER; note 2'-O-methoxyethyl(MOE)-5-methylcytidine-3'-phosphorothioate
  modified_base 3: mod_base = OTHER; note = 2'-O-methyluridine-3'-phosphate
  modified_base 4: mod_base = OTHER; note = 2'-O-methyluridine-3'-phosphate
  modified_base 5: mod_base = OTHER; note = 2'-O-methyluridine-3'-phosphate
  modified_base 6: mod_base = OTHER; note = 2'-O-methyluridine-3'-phosphate
  modified_base 7: mod_base = OTHER; note = 2'-fluoroguanosine-3'-phosphate
  modified_base 8: mod_base = OTHER; note = 2'-O-methyluridine-3'-phosphate
  modified_base 9: mod_base = OTHER; note = 2'-fluoroadenosine-3'-phosphate
  modified_base 10: mod_base = OTHER; note = 2'-fluoroadenosine-3'-phosphate
  modified_base 11: mod_base = OTHER; note = 2'-fluorocytidine-3'-phosphate
  modified_base 12: mod_base = OTHER; note = 2'-O-methyluridine-3'-phosphate
  modified_base 13: mod_base = OTHER; note = 2'-O-methyluridine-3'-phosphate
  modified_base 14: mod_base = OTHER; note = 2'-O-methylguanosine-3'-phosphate
  modified_base 15: mod_base = OTHER; note = 2'-O-methyladenosine-3'-phosphate
  modified_base 16: mod_base = OTHER; note = 2'-O-methyladenosine-3'-phosphate
  modified_base 17: mod_base = OTHER; note = 2'-O-methylguanosine-3'-phosphate
  modified_base 18: mod_base = OTHER; note = 2'-O-methyladenosine-3'-phosphate
  modified_base 19: mod_base = OTHER; note = 2'-O-methyluridine-3'-phosphate
  modified_base 20: mod_base = OTHER; note = 2'-O-methoxyethyl(MOE) adenosine-3'-phosphate
  modified_base 21: mod_base = OTHER; note = 2'-O-methoxyethyl(MOE)-thymidine(or 5-methyluridine)
gcttttgtaacttgaagatat

SEQ ID NO: 819 - RNA, 21 nt, synthetic construct
  source 1..21: mol_type = other RNA
  modified_base 1: mod_base = OTHER; note = 2'-O-methoxyethyl(MOE)-thymidine(or 5-methyluridine)-3'- phosphorothioate
  modified_base 2: mod_base = OTHER; note = 2'-O-methoxyethyl(MOE)-thymidine(or 5-methyluridine)-3'- phosphorothioate
  modified_base 3: mod_base = OTHER; note = 2'-O-methylguanosine-3'-phosphate
  modified_base 4: mod_base = OTHER; note = 2'-O-methyladenosine-3'-phosphate
  modified_base 5: mod_base = OTHER; note = 2'-O-methyladenosine-3'-phosphate
  modified_base 6: mod_base = OTHER; note = 2'-O-methylguanosine-3'-phosphate
  modified_base 7: mod_base = OTHER; note = 2'-fluorouridine-3'-phosphate
  modified_base 8: mod_base = OTHER; note = 2'-O-methyluridine-3'-phosphate
  modified_base 9: mod_base = OTHER; note = 2'-fluoroguanosine-3'-phosphate
  modified_base 10: mod_base = OTHER; note = 2'-fluorocytidine-3'-phosphate
  modified_base 11: mod_base = OTHER; note = 2'-fluorocytidine-3'-phosphate
  modified_base 12: mod_base = OTHER; note = 2'-O-methylcytidine-3'-phosphate
  modified_base 13: mod_base = OTHER; note = 2'-O-methylcytidine-3'-phosphate
  modified_base 14: mod_base = OTHER; note = 2'-O-methyladenosine-3'-phosphate
  modified_base 15: mod_base = OTHER; note = 2'-O-methyluridine-3'-phosphate
  modified_base 16: mod_base = OTHER; note = 2'-O-methylguanosine-3'-phosphate
  modified_base 17: mod_base = OTHER; note = 2'-O-methyluridine-3'-phosphate
  modified_base 18: mod_base = OTHER; note = 2'-O-methylcytidine-3'-phosphate
  modified_base 19: mod_base = OTHER; note = 2'-O-methylguanosine-3'-phosphate
  modified_base 20: mod_base = OTHER; note = 2'-O-methoxyethyl(MOE) adenosine-3'-phosphate
  modified_base 21: mod_base = OTHER; note = 2'-O-methoxyethyl(MOE) adenosine
ttgaagttgccccatgtcgaa

SEQ ID NO: 820 - RNA, 21 nt, synthetic construct
  source 1..21: mol_type = other RNA
  modified_base 1: mod_base = OTHER; note 2'-O-methoxyethyl(MOE)-5-methylcytidine-3'-phosphorothioate
  modified_base 2: mod_base = OTHER; note 2'-O-methoxyethyl(MOE)-5-methylcytidine-3'-phosphorothioate
  modified_base 3: mod_base = OTHER; note = 2'-O-methyluridine-3'-phosphate
  modified_base 4: mod_base = OTHER; note = 2'-O-methylcytidine-3'-phosphate
  modified_base 5: mod_base = OTHER; note = 2'-O-methyladenosine-3'-phosphate
  modified_base 6: mod_base = OTHER; note = 2'-O-methyluridine-3'-phosphate
  modified_base 7: mod_base = OTHER; note = 2'-fluoroadenosine-3'-phosphate
  modified_base 8: mod_base = OTHER; note = 2'-O-methylguanosine-3'-phosphate
  modified_base 9: mod_base = OTHER; note = 2'-fluoroguanosine-3'-phosphate
  modified_base 10: mod_base = OTHER; note = 2'-fluorocytidine-3'-phosphate
  modified_base 11: mod_base = OTHER; note = 2'-fluorocytidine-3'-phosphate
  modified_base 12: mod_base = OTHER; note = 2'-O-methyluridine-3'-phosphate
  modified_base 13: mod_base = OTHER; note = 2'-O-methylguanosine-3'-phosphate
  modified_base 14: mod_base = OTHER; note = 2'-O-methylguanosine-3'-phosphate
  modified_base 15: mod_base = OTHER; note = 2'-O-methyladenosine-3'-phosphate
  modified_base 16: mod_base = OTHER; note = 2'-O-methylguanosine-3'-phosphate
  modified_base 17: mod_base = OTHER; note = 2'-O-methyluridine-3'-phosphate
  modified_base 18: mod_base = OTHER; note = 2'-O-methyluridine-3'-phosphate
  modified_base 19: mod_base = OTHER; note = 2'-O-methyluridine-3'-phosphate
  modified_base 20: mod_base = OTHER; note = 2'-O-methoxyethyl(MOE) adenosine-3'-phosphate
  modified_base 21: mod_base = OTHER; note = 2'-O-methoxyethyl(MOE)-thymidine(or 5-methyluridine)
cctcataggcctggagtttat

SEQ ID NO: 821 - RNA, 21 nt, synthetic construct
  source 1..21: mol_type = other RNA
  modified_base 1: mod_base = OTHER; note = 2'-O-methoxyethyl(MOE) adenosine-3'-phosphorothioate
  modified_base 2: mod_base = OTHER; note = 2'-O-methoxyethyl(MOE) adenosine-3'-phosphorothioate
  modified_base 3: mod_base = OTHER; note = 2'-O-methylguanosine-3'-phosphate
  modified_base 4: mod_base = OTHER; note = 2'-O-methylcytidine-3'-phosphate
  modified_base 5: mod_base = OTHER; note = 2'-O-methylcytidine-3'-phosphate
  modified_base 6: mod_base = OTHER; note = 2'-O-methyladenosine-3'-phosphate
  modified_base 7: mod_base = OTHER; note = 2'-fluoroadenosine-3'-phosphate
  modified_base 8: mod_base = OTHER; note = 2'-O-methylguanosine-3'-phosphate
  modified_base 9: mod_base = OTHER; note = 2'-fluorocytidine-3'-phosphate
  modified_base 10: mod_base = OTHER; note = 2'-fluorocytidine-3'-phosphate
  modified_base 11: mod_base = OTHER; note = 2'-fluorouridine-3'-phosphate
  modified_base 12: mod_base = OTHER; note = 2'-O-methylcytidine-3'-phosphate
  modified_base 13: mod_base = OTHER; note = 2'-O-methyluridine-3'-phosphate
  modified_base 14: mod_base = OTHER; note = 2'-O-methyluridine-3'-phosphate
  modified_base 15: mod_base = OTHER; note = 2'-O-methylcytidine-3'-phosphate
  modified_base 16: mod_base = OTHER; note = 2'-O-methyluridine-3'-phosphate
  modified_base 17: mod_base = OTHER; note = 2'-O-methyluridine-3'-phosphate
  modified_base 18: mod_base = OTHER; note = 2'-O-methyladenosine-3'-phosphate
  modified_base 19: mod_base = OTHER; note = 2'-O-methylcytidine-3'-phosphate
  modified_base 20: mod_base = OTHER; note = 2'-O-methoxyethyl(MOE)-thymidine(or 5-methyluridine)-3'-phosphate
  modified_base 21: mod_base = OTHER; note = 2'-O-methoxyethyl(MOE)-thymidine(or 5-methyluridine)
aagccaagcctcttcttactt

SEQ ID NO: 822 - RNA, 21 nt, synthetic construct
  source 1..21: mol_type = other RNA
  modified_base 1: mod_base = OTHER; note = 2'-O-methoxyethyl(MOE) adenosine-3'-phosphorothioate
  modified_base 2: mod_base = OTHER; note = 2'-O-methoxyethyl(MOE) guanosine-3'-phosphorothioate
  modified_base 3: mod_base = OTHER; note = 2'-O-methylcytidine-3'-phosphate
  modified_base 4: mod_base = OTHER; note = 2'-O-methylcytidine-3'-phosphate
  modified_base 5: mod_base = OTHER; note = 2'-O-methyladenosine-3'-phosphate
  modified_base 6: mod_base = OTHER; note = 2'-O-methyladenosine-3'-phosphate
  modified_base 7: mod_base = OTHER; note = 2'-fluoroguanosine-3'-phosphate
  modified_base 8: mod_base = OTHER; note = 2'-O-methylcytidine-3'-phosphate
  modified_base 9: mod_base = OTHER; note = 2'-fluorocytidine-3'-phosphate
  modified_base 10: mod_base = OTHER; note = 2'-fluorouridine-3'-phosphate
  modified_base 11: mod_base = OTHER; note = 2'-fluorocytidine-3'-phosphate
  modified_base 12: mod_base = OTHER; note = 2'-O-methyluridine-3'-phosphate
  modified_base 13: mod_base = OTHER; note = 2'-O-methyluridine-3'-phosphate
  modified_base 14: mod_base = OTHER; note = 2'-O-methylcytidine-3'-phosphate
  modified_base 15: mod_base = OTHER; note = 2'-O-methyluridine-3'-phosphate
  modified_base 16: mod_base = OTHER; note = 2'-O-methyluridine-3'-phosphate
  modified_base 17: mod_base = OTHER; note = 2'-O-methyladenosine-3'-phosphate
  modified_base 18: mod_base = OTHER; note = 2'-O-methylcytidine-3'-phosphate
  modified_base 19: mod_base = OTHER; note = 2'-O-methyluridine-3'-phosphate
  modified_base 20: mod_base = OTHER; note = 2'-O-methoxyethyl(MOE)-thymidine(or 5-methyluridine)-3'-phosphate
  modified_base 21: mod_base = OTHER; note = 2'-O-methoxyethyl(MOE) adenosine
agccaagcctcttcttactta

SEQ ID NO: 823 - RNA, 21 nt, synthetic construct
  source 1..21: mol_type = other RNA
  modified_base 1: mod_base = OTHER; note = 2'-O-methoxyethyl(MOE)-thymidine(or 5-methyluridine)-3'- phosphorothioate
  modified_base 2: mod_base = OTHER; note = 2'-O-methoxyethyl(MOE)-thymidine(or 5-methyluridine)-3'- phosphorothioate
  modified_base 3: mod_base = OTHER; note = 2'-O-methyluridine-3'-phosphate
  modified_base 4: mod_base = OTHER; note = 2'-O-methyluridine-3'-phosphate
  modified_base 5: mod_base = OTHER; note = 2'-O-methylcytidine-3'-phosphate
  modified_base 6: mod_base = OTHER; note = 2'-O-methyluridine-3'-phosphate
  modified_base 7: mod_base = OTHER; note = 2'-fluoroadenosine-3'-phosphate
  modified_base 8: mod_base = OTHER; note = 2'-O-methylguanosine-3'-phosphate
  modified_base 9: mod_base = OTHER; note = 2'-fluoroadenosine-3'-phosphate
  modified_base 10: mod_base = OTHER; note = 2'-fluorocytidine-3'-phosphate
  modified_base 11: mod_base = OTHER; note = 2'-fluorocytidine-3'-phosphate
  modified_base 12: mod_base = OTHER; note = 2'-O-methyluridine-3'-phosphate
  modified_base 13: mod_base = OTHER; note = 2'-O-methylguanosine-3'-phosphate
  modified_base 14: mod_base = OTHER; note = 2'-O-methyluridine-3'-phosphate
  modified_base 15: mod_base = OTHER; note = 2'-O-methyluridine-3'-phosphate
  modified_base 16: mod_base = OTHER; note = 2'-O-methyluridine-3'-phosphate
  modified_base 17: mod_base = OTHER; note = 2'-O-methyluridine-3'-phosphate
  modified_base 18: mod_base = OTHER; note = 2'-O-methylguanosine-3'-phosphate
  modified_base 19: mod_base = OTHER; note = 2'-O-methylcytidine-3'-phosphate
  modified_base 20: mod_base = OTHER; note = 2'-O-methoxyethyl(MOE)-thymidine(or 5-methyluridine)-3'-phosphate
  modified_base 21: mod_base = OTHER; note = 2'-O-methoxyethyl(MOE)-thymidine(or 5-methyluridine)
ttttctagacctgttttgctt

SEQ ID NO: 824 - RNA, 21 nt, synthetic construct
  source 1..21: mol_type = other RNA
  modified_base 1: mod_base = OTHER; note = 2'-O-methoxyethyl(MOE) adenosine-3'-phosphorothioate
  modified_base 2: mod_base = OTHER; note = 2'-O-methoxyethyl(MOE) guanosine-3'-phosphorothioate
  modified_base 3: mod_base = OTHER; note = 2'-O-methyladenosine-3'-phosphate
  modified_base 4: mod_base = OTHER; note = 2'-O-methylcytidine-3'-phosphate
  modified_base 5: mod_base = OTHER; note = 2'-O-methylcytidine-3'-phosphate
  modified_base 6: mod_base = OTHER; note = 2'-O-methyluridine-3'-phosphate
  modified_base 7: mod_base = OTHER; note = 2'-fluoroguanosine-3'-phosphate
  modified_base 8: mod_base = OTHER; note = 2'-O-methyluridine-3'-phosphate
  modified_base 9: mod_base = OTHER; note = 2'-fluorouridine-3'-phosphate
  modified_base 10: mod_base = OTHER; note = 2'-fluorouridine-3'-phosphate
  modified_base 11: mod_base = OTHER; note = 2'-fluorouridine-3'-phosphate
  modified_base 12: mod_base = OTHER; note = 2'-O-methylguanosine-3'-phosphate
  modified_base 13: mod_base = OTHER; note = 2'-O-methylcytidine-3'-phosphate
  modified_base 14: mod_base = OTHER; note = 2'-O-methyluridine-3'-phosphate
  modified_base 15: mod_base = OTHER; note = 2'-O-methyluridine-3'-phosphate
  modified_base 16: mod_base = OTHER; note = 2'-O-methyluridine-3'-phosphate
  modified_base 17: mod_base = OTHER; note = 2'-O-methyluridine-3'-phosphate
  modified_base 18: mod_base = OTHER; note = 2'-O-methylguanosine-3'-phosphate
  modified_base 19: mod_base = OTHER; note = 2'-O-methyluridine-3'-phosphate
  modified_base 20: mod_base = OTHER; note = 2'-O-methoxyethyl(MOE) adenosine-3'-phosphate
  modified_base 21: mod_base = OTHER; note = 2'-O-methoxyethyl(MOE) adenosine
agacctgttttgcttttgtaa

SEQ ID NO: 825 - RNA, 21 nt, synthetic construct
  source 1..21: mol_type = other RNA
  modified_base 1: mod_base = OTHER; note = 2'-O-methoxyethyl(MOE)-thymidine(or 5-methyluridine)-3'- phosphorothioate
  modified_base 2: mod_base = OTHER; note = 2'-O-methoxyethyl(MOE)-thymidine(or 5-methyluridine)-3'- phosphorothioate
  modified_base 3: mod_base = OTHER; note = 2'-O-methylguanosine-3'-phosphate
  modified_base 4: mod_base = OTHER; note = 2'-O-methyluridine-3'-phosphate
  modified_base 5: mod_base = OTHER; note = 2'-O-methyladenosine-3'-phosphate
  modified_base 6: mod_base = OTHER; note = 2'-O-methyladenosine-3'-phosphate
  modified_base 7: mod_base = OTHER; note = 2'-fluorocytidine-3'-phosphate
  modified_base 8: mod_base = OTHER; note = 2'-O-methyluridine-3'-phosphate
  modified_base 9: mod_base = OTHER; note = 2'-fluorouridine-3'-phosphate
  modified_base 10: mod_base = OTHER; note = 2'-fluoroguanosine-3'-phosphate
  modified_base 11: mod_base = OTHER; note = 2'-fluoroadenosine-3'-phosphate
  modified_base 12: mod_base = OTHER; note = 2'-O-methyladenosine-3'-phosphate
  modified_base 13: mod_base = OTHER; note = 2'-O-methylguanosine-3'-phosphate
  modified_base 14: mod_base = OTHER; note = 2'-O-methyladenosine-3'-phosphate
  modified_base 15: mod_base = OTHER; note = 2'-O-methyluridine-3'-phosphate
  modified_base 16: mod_base = OTHER; note = 2'-O-methyladenosine-3'-phosphate
  modified_base 17: mod_base = OTHER; note = 2'-O-methyluridine-3'-phosphate
  modified_base 18: mod_base = OTHER; note = 2'-O-methyluridine-3'-phosphate
  modified_base 19: mod_base = OTHER; note = 2'-O-methyluridine-3'-phosphate
  modified_base 20: mod_base = OTHER; note = 2'-O-methoxyethyl(MOE) adenosine-3'-phosphate
  modified_base 21: mod_base = OTHER; note = 2'-O-methoxyethyl(MOE)-thymidine(or 5-methyluridine)
ttgtaacttgaagatatttat

SEQ ID NO: 826 - RNA, 21 nt, synthetic construct
  source 1..21: mol_type = other RNA
  modified_base 1: mod_base = OTHER; note = 2'-O-methoxyethyl(MOE) guanosine-3'-phosphorothioate
  modified_base 2: mod_base = OTHER; note = 2'-O-methoxyethyl(MOE)-thymidine(or 5-methyluridine)-3'- phosphorothioate
  modified_base 3: mod_base = OTHER; note = 2'-O-methyluridine-3'-phosphate
  modified_base 4: mod_base = OTHER; note = 2'-O-methyluridine-3'-phosphate
  modified_base 5: mod_base = OTHER; note = 2'-O-methyluridine-3'-phosphate
  modified_base 6: mod_base = OTHER; note = 2'-O-methylguanosine-3'-phosphate
  modified_base 7: mod_base = OTHER; note = 2'-fluorocytidine-3'-phosphate
  modified_base 8: mod_base = OTHER; note = 2'-O-methyluridine-3'-phosphate
  modified_base 9: mod_base = OTHER; note = 2'-fluorouridine-3'-phosphate
  modified_base 10: mod_base = OTHER; note = 2'-fluorouridine-3'-phosphate
  modified_base 11: mod_base = OTHER; note = 2'-fluorouridine-3'-phosphate
  modified_base 12: mod_base = OTHER; note = 2'-O-methylguanosine-3'-phosphate
  modified_base 13: mod_base = OTHER; note = 2'-O-methyluridine-3'-phosphate
  modified_base 14: mod_base = OTHER; note = 2'-O-methyladenosine-3'-phosphate
  modified_base 15: mod_base = OTHER; note = 2'-O-methyladenosine-3'-phosphate
  modified_base 16: mod_base = OTHER; note = 2'-O-methylcytidine-3'-phosphate
  modified_base 17: mod_base = OTHER; note = 2'-O-methyluridine-3'-phosphate
  modified_base 18: mod_base = OTHER; note = 2'-O-methyluridine-3'-phosphate
  modified_base 19: mod_base = OTHER; note = 2'-O-methylguanosine-3'-phosphate
  modified_base 20: mod_base = OTHER; note = 2'-O-methoxyethyl(MOE) adenosine-3'-phosphate
  modified_base 21: mod_base = OTHER; note = 2'-O-methoxyethyl(MOE) adenosine
gttttgcttttgtaacttgaa

SEQ ID NO: 827 - RNA, 21 nt, synthetic construct
  source 1..21: mol_type = other RNA
  modified_base 1: mod_base = OTHER; note = 2'-O-methoxyethyl(MOE)-thymidine(or 5-methyluridine)-3'- phosphorothioate
  modified_base 2: mod_base = OTHER; note = 2'-O-methoxyethyl(MOE)-thymidine(or 5-methyluridine)-3'- phosphorothioate
  modified_base 3: mod_base = OTHER; note = 2'-O-methyluridine-3'-phosphate
  modified_base 4: mod_base = OTHER; note = 2'-O-methyluridine-3'-phosphate
  modified_base 5: mod_base = OTHER; note = 2'-O-methylcytidine-3'-phosphate
  modified_base 6: mod_base = OTHER; note = 2'-O-methyluridine-3'-phosphate
  modified_base 7: mod_base = OTHER; note = 2'-O-methyladenosine-3'-phosphate
  modified_base 8: mod_base = OTHER; note = 2'-O-methylguanosine-3'-phosphate
  modified_base 9: mod_base = OTHER; note = 2'-fluoroadenosine-3'-phosphate
  modified_base 10: mod_base = OTHER; note = 2'-fluorocytidine-3'-phosphate
  modified_base 11: mod_base = OTHER; note = 2'-fluorocytidine-3'-phosphate
  modified_base 12: mod_base = OTHER; note = 2'-O-methyluridine-3'-phosphate
  modified_base 13: mod_base = OTHER; note = 2'-O-methylguanosine-3'-phosphate
  modified_base 14: mod_base = OTHER; note = 2'-O-methyluridine-3'-phosphate
  modified_base 15: mod_base = OTHER; note = 2'-O-methyluridine-3'-phosphate
  modified_base 16: mod_base = OTHER; note = 2'-O-methyluridine-3'-phosphate
  modified_base 17: mod_base = OTHER; note = 2'-O-methyluridine-3'-phosphate
  modified_base 18: mod_base = OTHER; note = 2'-O-methylguanosine-3'-phosphate
  modified_base 19: mod_base = OTHER; note = 2'-O-methylcytidine-3'-phosphorothioate
  modified_base 20: mod_base = OTHER; note = 2'-O-methoxyethyl(MOE)-thymidine(or 5-methyluridine)-3'- phosphorothioate
  modified_base 21: mod_base = OTHER; note = 2'-O-methoxyethyl(MOE)-thymidine(or 5-methyluridine)
ttttctagacctgttttgctt

SEQ ID NO: 828 - RNA, 21 nt, synthetic construct
  source 1..21: mol_type = other RNA
  modified_base 1: mod_base = OTHER; note = 2'-O-methoxyethyl(MOE) adenosine-3'-phosphorothioate
  modified_base 2: mod_base = OTHER; note = 2'-O-methoxyethyl(MOE) guanosine-3'-phosphorothioate
  modified_base 3: mod_base = OTHER; note = 2'-O-methyladenosine-3'-phosphate
  modified_base 4: mod_base = OTHER; note = 2'-O-methylcytidine-3'-phosphate
  modified_base 5: mod_base = OTHER; note = 2'-O-methylcytidine-3'-phosphate
  modified_base 6: mod_base = OTHER; note = 2'-O-methyluridine-3'-phosphate
  modified_base 7: mod_base = OTHER; note = 2'-fluoroguanosine-3'-phosphate
  modified_base 8: mod_base = OTHER; note = 2'-O-methyluridine-3'-phosphate
  modified_base 9: mod_base = OTHER; note = 2'-fluorouridine-3'-phosphate
  modified_base 10: mod_base = OTHER; note = 2'-fluorouridine-3'-phosphate
  modified_base 11: mod_base = OTHER; note = 2'-fluorouridine-3'-phosphate
  modified_base 12: mod_base = OTHER; note = 2'-O-methylguanosine-3'-phosphate
  modified_base 13: mod_base = OTHER; note = 2'-O-methylcytidine-3'-phosphate
  modified_base 14: mod_base = OTHER; note = 2'-O-methyluridine-3'-phosphate
  modified_base 15: mod_base = OTHER; note = 2'-O-methyluridine-3'-phosphate
  modified_base 16: mod_base = OTHER; note = 2'-O-methyluridine-3'-phosphate
  modified_base 17: mod_base = OTHER; note = 2'-O-methyluridine-3'-phosphate
  modified_base 18: mod_base = OTHER; note = 2'-O-methylguanosine-3'-phosphate
  modified_base 19: mod_base = OTHER; note = 2'-O-methyluridine-3'-phosphorothioate
  modified_base 20: mod_base = OTHER; note = 2'-O-methoxyethyl(MOE) adenosine-3'-phosphorothioate
  modified_base 21: mod_base = OTHER; note = 2'-O-methoxyethyl(MOE) adenosine
agacctgttttgcttttgtaa

SEQ ID NO: 829 - RNA, 21 nt, synthetic construct
  source 1..21: mol_type = other RNA
  modified_base 1: mod_base = OTHER; note = 2'-O-methoxyethyl(MOE)-thymidine(or 5-methyluridine)-3'- phosphorothioate
  modified_base 2: mod_base = OTHER; note = 2'-O-methoxyethyl(MOE)-thymidine(or 5-methyluridine)-3'- phosphorothioate
  modified_base 3: mod_base = OTHER; note = 2'-O-methylguanosine-3'-phosphate
  modified_base 4: mod_base = OTHER; note = 2'-O-methyluridine-3'-phosphate
  modified_base 5: mod_base = OTHER; note = 2'-O-methyladenosine-3'-phosphate
  modified_base 6: mod_base = OTHER; note = 2'-O-methyladenosine-3'-phosphate
  modified_base 7: mod_base = OTHER; note = 2'-O-methylcytidine-3'-phosphate
  modified_base 8: mod_base = OTHER; note = 2'-O-methyluridine-3'-phosphate
  modified_base 9: mod_base = OTHER; note = 2'-fluorouridine-3'-phosphate
  modified_base 10: mod_base = OTHER; note = 2'-fluoroguanosine-3'-phosphate
  modified_base 11: mod_base = OTHER; note = 2'-fluoroadenosine-3'-phosphate
  modified_base 12: mod_base = OTHER; note = 2'-O-methyladenosine-3'-phosphate
  modified_base 13: mod_base = OTHER; note = 2'-O-methylguanosine-3'-phosphate
  modified_base 14: mod_base = OTHER; note = 2'-O-methyladenosine-3'-phosphate
  modified_base 15: mod_base = OTHER; note = 2'-O-methyluridine-3'-phosphate
  modified_base 16: mod_base = OTHER; note = 2'-O-methyladenosine-3'-phosphate
  modified_base 17: mod_base = OTHER; note = 2'-O-methyluridine-3'-phosphate
  modified_base 18: mod_base = OTHER; note = 2'-O-methyluridine-3'-phosphate
  modified_base 19: mod_base = OTHER; note = 2'-O-methyluridine-3'-phosphorothioate
  modified_base 20: mod_base = OTHER; note = 2'-O-methoxyethyl(MOE) adenosine-3'-phosphorothioate
  modified_base 21: mod_base = OTHER; note = 2'-O-methoxyethyl(MOE)-thymidine(or 5-methyluridine)
ttgtaacttgaagatatttat

SEQ ID NO: 830 - RNA, 21 nt, synthetic construct
  source 1..21: mol_type = other RNA
  modified_base 1: mod_base = OTHER; note = 2'-O-methoxyethyl(MOE) guanosine-3'-phosphorothioate
  modified_base 2: mod_base = OTHER; note = 2'-O-methoxyethyl(MOE)-thymidine(or 5-methyluridine)-3'- phosphorothioate
  modified_base 3: mod_base = OTHER; note = 2'-O-methyluridine-3'-phosphate
  modified_base 4: mod_base = OTHER; note = 2'-O-methyluridine-3'-phosphate
  modified_base 5: mod_base = OTHER; note = 2'-O-methyluridine-3'-phosphate
  modified_base 6: mod_base = OTHER; note = 2'-O-methylguanosine-3'-phosphate
  modified_base 7: mod_base = OTHER; note = 2'-fluorocytidine-3'-phosphate
  modified_base 8: mod_base = OTHER; note = 2'-O-methyluridine-3'-phosphate
  modified_base 9: mod_base = OTHER; note = 2'-fluorouridine-3'-phosphate
  modified_base 10: mod_base = OTHER; note = 2'-fluorouridine-3'-phosphate
  modified_base 11: mod_base = OTHER; note = 2'-fluorouridine-3'-phosphate
  modified_base 12: mod_base = OTHER; note = 2'-O-methylguanosine-3'-phosphate
  modified_base 13: mod_base = OTHER; note = 2'-O-methyluridine-3'-phosphate
  modified_base 14: mod_base = OTHER; note = 2'-O-methyladenosine-3'-phosphate
  modified_base 15: mod_base = OTHER; note = 2'-O-methyladenosine-3'-phosphate
  modified_base 16: mod_base = OTHER; note = 2'-O-methylcytidine-3'-phosphate
  modified_base 17: mod_base = OTHER; note = 2'-O-methyluridine-3'-phosphate
  modified_base 18: mod_base = OTHER; note = 2'-O-methyluridine-3'-phosphate
  modified_base 19: mod_base = OTHER; note = 2'-O-methylguanosine-3'-phosphorothioate
  modified_base 20: mod_base = OTHER; note = 2'-O-methoxyethyl(MOE) adenosine-3'-phosphorothioate
  modified_base 21: mod_base = OTHER; note = 2'-O-methoxyethyl(MOE) adenosine
gttttgcttttgtaacttgaa

SEQ ID NO: 831 - RNA, 21 nt, synthetic construct
  source 1..21: mol_type = other RNA
  modified_base 1: mod_base = OTHER; note = 2'-O-methoxyethyl(MOE) guanosine-3'-phosphorothioate
  modified_base 2: mod_base = OTHER; note = 2'-O-methoxyethyl(MOE)-thymidine(or 5-methyluridine)-3'- phosphorothioate
  modified_base 3: mod_base = OTHER; note = 2'-O-methyluridine-3'-phosphate
  modified_base 4: mod_base = OTHER; note = 2'-O-methyluridine-3'-phosphate
  modified_base 5: mod_base = OTHER; note = 2'-O-methyluridine-3'-phosphate
  modified_base 6: mod_base = OTHER; note = 2'-O-methylguanosine-3'-phosphate
  modified_base 7: mod_base = OTHER; note = 2'-fluorocytidine-3'-phosphate
  modified_base 8: mod_base = OTHER; note = 2'-O-methyluridine-3'-phosphate
  modified_base 9: mod_base = OTHER; note = 2'-fluorouridine-3'-phosphate
  modified_base 10: mod_base = OTHER; note = 2'-fluorouridine-3'-phosphate
  modified_base 11: mod_base = OTHER; note = 2'-fluorouridine-3'-phosphate
  modified_base 12: mod_base = OTHER; note = 2'-O-methylguanosine-3'-phosphate
  modified_base 13: mod_base = OTHER; note = 2'-O-methyluridine-3'-phosphate
  modified_base 14: mod_base = OTHER; note = 2'-O-methyladenosine-3'-phosphate
  modified_base 15: mod_base = OTHER; note = 2'-O-methyladenosine-3'-phosphate
  modified_base 16: mod_base = OTHER; note = 2'-O-methylcytidine-3'-phosphate
  modified_base 17: mod_base = OTHER; note = 2'-O-methyluridine-3'-phosphate
  modified_base 18: mod_base = OTHER; note = 2'-O-methyluridine-3'-phosphate
  modified_base 19: mod_base = OTHER; note = 2'-O-methylguanosine-3'-phosphorothioate
  modified_base 20: mod_base = OTHER; note = 2'-O-methoxyethyl(MOE) adenosine-3'-phosphorothioate
  modified_base 21: mod_base = OTHER; note = 2'-O-methoxyethyl(MOE) adenosine
gttttgcttttgtaacttgaa

SEQ ID NO: 832 - RNA, 21 nt, synthetic construct
  source 1..21: mol_type = other RNA
  modified_base 1: mod_base = OTHER; note = 2'-O-methoxyethyl(MOE) guanosine-3'-phosphorothioate
  modified_base 2: mod_base = OTHER; note = 2'-O-methoxyethyl(MOE)-thymidine(or 5-methyluridine)-3'- phosphorothioate
  modified_base 3: mod_base = OTHER; note = 2'-O-methyluridine-3'-phosphate
  modified_base 4: mod_base = OTHER; note = 2'-O-methyluridine-3'-phosphate
  modified_base 5: mod_base = OTHER; note = 2'-O-methyluridine-3'-phosphate
  modified_base 6: mod_base = OTHER; note = 2'-O-methylguanosine-3'-phosphate
  modified_base 7: mod_base = OTHER; note = 2'-fluorocytidine-3'-phosphate
  modified_base 8: mod_base = OTHER; note = 2'-O-methyluridine-3'-phosphate
  modified_base 9: mod_base = OTHER; note = 2'-fluorouridine-3'-phosphate
  modified_base 10: mod_base = OTHER; note = 2'-fluorouridine-3'-phosphate
  modified_base 11: mod_base = OTHER; note = 2'-fluorouridine-3'-phosphate
  modified_base 12: mod_base = OTHER; note = 2'-O-methylguanosine-3'-phosphate
  modified_base 13: mod_base = OTHER; note = 2'-O-methyluridine-3'-phosphate
  modified_base 14: mod_base = OTHER; note = 2'-O-methyladenosine-3'-phosphate
  modified_base 15: mod_base = OTHER; note = 2'-O-methyladenosine-3'-phosphate
  modified_base 16: mod_base = OTHER; note = 2'-O-methylcytidine-3'-phosphate
  modified_base 17: mod_base = OTHER; note = 2'-O-methyluridine-3'-phosphate
  modified_base 18: mod_base = OTHER; note = 2'-O-methyluridine-3'-phosphate
  modified_base 19: mod_base = OTHER; note = 2'-O-methylguanosine-3'-phosphorothioate
  modified_base 20: mod_base = OTHER; note = 2'-O-methoxyethyl(MOE) adenosine-3'-phosphorothioate
  modified_base 21: mod_base = OTHER; note = 2'-O-methoxyethyl(MOE) adenosine
gttttgcttttgtaacttgaa

SEQ ID NO: 833 - RNA, 21 nt, synthetic construct
  source 1..21: mol_type = other RNA
  modified_base 1: mod_base = OTHER; note = 2'-O-methoxyethyl(MOE) guanosine-3'-phosphorothioate
  modified_base 2: mod_base = OTHER; note = 2'-O-methoxyethyl(MOE)-thymidine(or 5-methyluridine)-3'- phosphorothioate
  modified_base 3: mod_base = OTHER; note = 2'-O-methyluridine-3'-phosphate
  modified_base 4: mod_base = OTHER; note = 2'-O-methyluridine-3'-phosphate
  modified_base 5: mod_base = OTHER; note = 2'-O-methyluridine-3'-phosphate
  modified_base 6: mod_base = OTHER; note = 2'-O-methylguanosine-3'-phosphate
  modified_base 7: mod_base = OTHER; note = 2'-fluorocytidine-3'-phosphate
  modified_base 8: mod_base = OTHER; note = 2'-O-methyluridine-3'-phosphate
  modified_base 9: mod_base = OTHER; note = 2'-fluorouridine-3'-phosphate
  modified_base 10: mod_base = OTHER; note = 2'-fluorouridine-3'-phosphate
  modified_base 11: mod_base = OTHER; note = 2'-fluorouridine-3'-phosphate
  modified_base 12: mod_base = OTHER; note = 2'-O-methylguanosine-3'-phosphate
  modified_base 13: mod_base = OTHER; note = 2'-O-methyluridine-3'-phosphate
  modified_base 14: mod_base = OTHER; note = 2'-O-methyladenosine-3'-phosphate
  modified_base 15: mod_base = OTHER; note = 2'-O-methyladenosine-3'-phosphate
  modified_base 16: mod_base = OTHER; note = 2'-O-methylcytidine-3'-phosphate
  modified_base 17: mod_base = OTHER; note = 2'-O-methyluridine-3'-phosphate
  modified_base 18: mod_base = OTHER; note = 2'-O-methyluridine-3'-phosphate
  modified_base 19: mod_base = OTHER; note = 2'-O-methylguanosine-3'-phosphorothioate
  modified_base 20: mod_base = OTHER; note = 2'-O-methoxyethyl(MOE) adenosine-3'-phosphorothioate
  modified_base 21: mod_base = OTHER; note = 2'-O-methoxyethyl(MOE) adenosine
gttttgcttttgtaacttgaa

SEQ ID NO: 834 - RNA, 21 nt, synthetic construct
  source 1..21: mol_type = other RNA
  modified_base 1: mod_base = OTHER; note = 2'-O-methoxyethyl(MOE) guanosine-3'-phosphorothioate
  modified_base 2: mod_base = OTHER; note = 2'-O-methoxyethyl(MOE)-thymidine(or 5-methyluridine)-3'- phosphorothioate
  modified_base 3: mod_base = OTHER; note = 2'-O-methyluridine-3'-phosphate
  modified_base 4: mod_base = OTHER; note = 2'-O-methyluridine-3'-phosphate
  modified_base 5: mod_base = OTHER; note = 2'-O-methyluridine-3'-phosphate
  modified_base 6: mod_base = OTHER; note = 2'-O-methylguanosine-3'-phosphate
  modified_base 7: mod_base = OTHER; note = 2'-fluorocytidine-3'-phosphate
  modified_base 8: mod_base = OTHER; note = 2'-O-methyluridine-3'-phosphate
  modified_base 9: mod_base = OTHER; note = 2'-fluorouridine-3'-phosphate
  modified_base 10: mod_base = OTHER; note = 2'-fluorouridine-3'-phosphate
  modified_base 11: mod_base = OTHER; note = 2'-fluorouridine-3'-phosphate
  modified_base 12: mod_base = OTHER; note = 2'-O-methylguanosine-3'-phosphate
  modified_base 13: mod_base = OTHER; note = 2'-O-methyluridine-3'-phosphate
  modified_base 14: mod_base = OTHER; note = 2'-O-methyladenosine-3'-phosphate
  modified_base 15: mod_base = OTHER; note = 2'-O-methyladenosine-3'-phosphate
  modified_base 16: mod_base = OTHER; note = 2'-O-methylcytidine-3'-phosphate
  modified_base 17: mod_base = OTHER; note = 2'-O-methyluridine-3'-phosphate
  modified_base 18: mod_base = OTHER; note = 2'-O-methyluridine-3'-phosphate
  modified_base 19: mod_base = OTHER; note = 2'-O-methylguanosine-3'-phosphorothioate
  modified_base 20: mod_base = OTHER; note = 2'-O-methoxyethyl(MOE) adenosine-3'-phosphorothioate
  modified_base 21: mod_base = OTHER; note = 2'-O-methoxyethyl(MOE) adenosine
gttttgcttttgtaacttgaa

SEQ ID NO: 835 - RNA, 21 nt, synthetic construct
  source 1..21: mol_type = other RNA
  modified_base 1: mod_base = OTHER; note = 2'-O-methoxyethyl(MOE) guanosine-3'-phosphorothioate
  modified_base 2: mod_base = OTHER; note = 2'-O-methoxyethyl(MOE)-thymidine(or 5-methyluridine)-3'- phosphorothioate
  modified_base 3: mod_base = OTHER; note = 2'-O-methyluridine-3'-phosphate
  modified_base 4: mod_base = OTHER; note = 2'-O-methyluridine-3'-phosphate
  modified_base 5: mod_base = OTHER; note = 2'-O-methyluridine-3'-phosphate
  modified_base 6: mod_base = OTHER; note = 2'-O-methylguanosine-3'-phosphate
  modified_base 7: mod_base = OTHER; note = 2'-fluorocytidine-3'-phosphate
  modified_base 8: mod_base = OTHER; note = 2'-O-methyluridine-3'-phosphate
  modified_base 9: mod_base = OTHER; note = 2'-fluorouridine-3'-phosphate
  modified_base 10: mod_base = OTHER; note = 2'-fluorouridine-3'-phosphate
  modified_base 11: mod_base = OTHER; note = 2'-fluorouridine-3'-phosphate
  modified_base 12: mod_base = OTHER; note = 2'-O-methylguanosine-3'-phosphate
  modified_base 13: mod_base = OTHER; note = 2'-O-methyluridine-3'-phosphate
  modified_base 14: mod_base = OTHER; note = 2'-O-methyladenosine-3'-phosphate
  modified_base 15: mod_base = OTHER; note = 2'-O-methyladenosine-3'-phosphate
  modified_base 16: mod_base = OTHER; note = 2'-O-methylcytidine-3'-phosphate
  modified_base 17: mod_base = OTHER; note = 2'-O-methyluridine-3'-phosphate
  modified_base 18: mod_base = OTHER; note = 2'-O-methyluridine-3'-phosphate
  modified_base 19: mod_base = OTHER; note = 2'-O-methylguanosine-3'-phosphorothioate
  modified_base 20: mod_base = OTHER; note = 2'-O-methoxyethyl(MOE) adenosine-3'-phosphorothioate
  modified_base 21: mod_base = OTHER; note = 2'-O-methoxyethyl(MOE) adenosine
gttttgcttttgtaacttgaa

SEQ ID NO: 836 - RNA, 21 nt, synthetic construct
  source 1..21: mol_type = other RNA
  modified_base 1: mod_base = OTHER; note = 2'-O-methoxyethyl(MOE) guanosine-3'-phosphorothioate
  modified_base 2: mod_base = OTHER; note = 2'-O-methoxyethyl(MOE)-thymidine(or 5-methyluridine)-3'- phosphorothioate
  modified_base 3: mod_base = OTHER; note = 2'-O-methyluridine-3'-phosphate
  modified_base 4: mod_base = OTHER; note = 2'-O-methyluridine-3'-phosphate
  modified_base 5: mod_base = OTHER; note = 2'-O-methyluridine-3'-phosphate
  modified_base 6: mod_base = OTHER; note = 2'-O-methylguanosine-3'-phosphate
  modified_base 7: mod_base = OTHER; note = 2'-fluorocytidine-3'-phosphate
  modified_base 8: mod_base = OTHER; note = 2'-O-methyluridine-3'-phosphate
  modified_base 9: mod_base = OTHER; note = 2'-fluorouridine-3'-phosphate
  modified_base 10: mod_base = OTHER; note = 2'-fluorouridine-3'-phosphate
  modified_base 11: mod_base = OTHER; note = 2'-fluorouridine-3'-phosphate
  modified_base 12: mod_base = OTHER; note = 2'-O-methylguanosine-3'-phosphate
  modified_base 13: mod_base = OTHER; note = 2'-O-methyluridine-3'-phosphate
  modified_base 14: mod_base = OTHER; note = 2'-O-methyladenosine-3'-phosphate
  modified_base 15: mod_base = OTHER; note = 2'-O-methyladenosine-3'-phosphate
  modified_base 16: mod_base = OTHER; note = 2'-O-methylcytidine-3'-phosphate
  modified_base 17: mod_base = OTHER; note = 2'-O-methyluridine-3'-phosphate
  modified_base 18: mod_base = OTHER; note = 2'-O-methyluridine-3'-phosphate
  modified_base 19: mod_base = OTHER; note = 2'-O-methylguanosine-3'-phosphorothioate
  modified_base 20: mod_base = OTHER; note = 2'-O-methoxyethyl(MOE) adenosine-3'-phosphorothioate
  modified_base 21: mod_base = OTHER; note = 2'-O-methoxyethyl(MOE) adenosine
gttttgcttttgtaacttgaa

SEQ ID NO: 837 - RNA, 21 nt, synthetic construct
  source 1..21: mol_type = other RNA
  modified_base 1: mod_base = OTHER; note = 2'-O-methoxyethyl(MOE) guanosine-3'-phosphorothioate
  modified_base 2: mod_base = OTHER; note = 2'-O-methoxyethyl(MOE)-thymidine(or 5-methyluridine)-3'- phosphorothioate
  modified_base 3: mod_base = OTHER; note = 2'-O-methyluridine-3'-phosphate
  modified_base 4: mod_base = OTHER; note = 2'-O-methyluridine-3'-phosphate
  modified_base 5: mod_base = OTHER; note = 2'-O-methyluridine-3'-phosphate
  modified_base 6: mod_base = OTHER; note = 2'-O-methylguanosine-3'-phosphate
  modified_base 7: mod_base = OTHER; note = 2'-fluorocytidine-3'-phosphate
  modified_base 8: mod_base = OTHER; note = 2'-O-methyluridine-3'-phosphate
  modified_base 9: mod_base = OTHER; note = 2'-fluorouridine-3'-phosphate
  modified_base 10: mod_base = OTHER; note = 2'-fluorouridine-3'-phosphate
  modified_base 11: mod_base = OTHER; note = 2'-fluorouridine-3'-phosphate
  modified_base 12: mod_base = OTHER; note = 2'-O-methylguanosine-3'-phosphate
  modified_base 13: mod_base = OTHER; note = 2'-O-methyluridine-3'-phosphate
  modified_base 14: mod_base = OTHER; note = 2'-O-methyladenosine-3'-phosphate
  modified_base 15: mod_base = OTHER; note = 2'-O-methyladenosine-3'-phosphate
  modified_base 16: mod_base = OTHER; note = 2'-O-methylcytidine-3'-phosphate
  modified_base 17: mod_base = OTHER; note = 2'-O-methyluridine-3'-phosphate
  modified_base 18: mod_base = OTHER; note = 2'-O-methyluridine-3'-phosphate
  modified_base 19: mod_base = OTHER; note = 2'-O-methylguanosine-3'-phosphorothioate
  modified_base 20: mod_base = OTHER; note = 2'-O-methoxyethyl(MOE) adenosine-3'-phosphorothioate
  modified_base 21: mod_base = OTHER; note = 2'-O-methoxyethyl(MOE) adenosine
gttttgcttttgtaacttgaa

SEQ ID NO: 838 - RNA, 21 nt, synthetic construct
  source 1..21: mol_type = other RNA
  modified_base 1: mod_base = OTHER; note = 2'-O-methoxyethyl(MOE) guanosine-3'-phosphorothioate
  modified_base 2: mod_base = OTHER; note = 2'-O-methoxyethyl(MOE)-thymidine(or 5-methyluridine)-3'- phosphorothioate
  modified_base 3: mod_base = OTHER; note = 2'-O-methyluridine-3'-phosphate
  modified_base 4: mod_base = OTHER; note = 2'-O-methyluridine-3'-phosphate
  modified_base 5: mod_base = OTHER; note = 2'-O-methyluridine-3'-phosphate
  modified_base 6: mod_base = OTHER; note = 2'-O-methylguanosine-3'-phosphate
  modified_base 7: mod_base = OTHER; note = 2'-fluorocytidine-3'-phosphate
  modified_base 8: mod_base = OTHER; note = 2'-O-methyluridine-3'-phosphate
  modified_base 9: mod_base = OTHER; note = 2'-fluorouridine-3'-phosphate
  modified_base 10: mod_base = OTHER; note = 2'-fluorouridine-3'-phosphate
  modified_base 11: mod_base = OTHER; note = 2'-fluorouridine-3'-phosphate
  modified_base 12: mod_base = OTHER; note = 2'-O-methylguanosine-3'-phosphate
  modified_base 13: mod_base = OTHER; note = 2'-O-methyluridine-3'-phosphate
  modified_base 14: mod_base = OTHER; note = 2'-O-methyladenosine-3'-phosphate
  modified_base 15: mod_base = OTHER; note = 2'-O-methyladenosine-3'-phosphate
  modified_base 16: mod_base = OTHER; note = 2'-O-methylcytidine-3'-phosphate
  modified_base 17: mod_base = OTHER; note = 2'-O-methyluridine-3'-phosphate
  modified_base 18: mod_base = OTHER; note = 2'-O-methyluridine-3'-phosphate
  modified_base 19: mod_base = OTHER; note = 2'-O-methylguanosine-3'-phosphorothioate
  modified_base 20: mod_base = OTHER; note = 2'-O-methoxyethyl(MOE) adenosine-3'-phosphorothioate
  modified_base 21: mod_base = OTHER; note = 2'-O-methoxyethyl(MOE) adenosine
gttttgcttttgtaacttgaa

SEQ ID NO: 839 - RNA, 21 nt, synthetic construct
  source 1..21: mol_type = other RNA
  modified_base 1: mod_base = OTHER; note = 2'-O-methoxyethyl(MOE) guanosine-3'-phosphorothioate
  modified_base 2: mod_base = OTHER; note = 2'-O-methoxyethyl(MOE)-thymidine(or 5-methyluridine)-3'- phosphorothioate
  modified_base 3: mod_base = OTHER; note = 2'-O-methyluridine-3'-phosphate
  modified_base 4: mod_base = OTHER; note = 2'-O-methyluridine-3'-phosphate
  modified_base 5: mod_base = OTHER; note = 2'-O-methyluridine-3'-phosphate
  modified_base 6: mod_base = OTHER; note = 2'-O-methylguanosine-3'-phosphate
  modified_base 7: mod_base = OTHER; note = 2'-fluorocytidine-3'-phosphate
  modified_base 8: mod_base = OTHER; note = 2'-O-methyluridine-3'-phosphate
  modified_base 9: mod_base = OTHER; note = 2'-fluorouridine-3'-phosphate
  modified_base 10: mod_base = OTHER; note = 2'-fluorouridine-3'-phosphate
  modified_base 11: mod_base = OTHER; note = 2'-fluorouridine-3'-phosphate
  modified_base 12: mod_base = OTHER; note = 2'-O-methylguanosine-3'-phosphate
  modified_base 13: mod_base = OTHER; note = 2'-O-methyluridine-3'-phosphate
  modified_base 14: mod_base = OTHER; note = 2'-O-methyladenosine-3'-phosphate
  modified_base 15: mod_base = OTHER; note = 2'-O-methyladenosine-3'-phosphate
  modified_base 16: mod_base = OTHER; note = 2'-O-methylcytidine-3'-phosphate
  modified_base 17: mod_base = OTHER; note = 2'-O-methyluridine-3'-phosphate
  modified_base 18: mod_base = OTHER; note = 2'-O-methyluridine-3'-phosphate
  modified_base 19: mod_base = OTHER; note = 2'-O-methylguanosine-3'-phosphorothioate
  modified_base 20: mod_base = OTHER; note = 2'-O-methoxyethyl(MOE) adenosine-3'-phosphorothioate
  modified_base 21: mod_base = OTHER; note = 2'-O-methoxyethyl(MOE) adenosine
gttttgcttttgtaacttgaa

SEQ ID NO: 840 - RNA, 21 nt, synthetic construct
  source 1..21: mol_type = other RNA
  modified_base 1: mod_base = OTHER; note = 2'-O-methoxyethyl(MOE) guanosine-3'-phosphorothioate
  modified_base 2: mod_base = OTHER; note = 2'-O-methoxyethyl(MOE)-thymidine(or 5-methyluridine)-3'- phosphorothioate
  modified_base 3: mod_base = OTHER; note = 2'-O-methyluridine-3'-phosphate
  modified_base 4: mod_base = OTHER; note = 2'-O-methyluridine-3'-phosphate
  modified_base 5: mod_base = OTHER; note = 2'-O-methyluridine-3'-phosphate
  modified_base 6: mod_base = OTHER; note = 2'-O-methylguanosine-3'-phosphate
  modified_base 7: mod_base = OTHER; note = 2'-fluorocytidine-3'-phosphate
  modified_base 8: mod_base = OTHER; note = 2'-O-methyluridine-3'-phosphate
  modified_base 9: mod_base = OTHER; note = 2'-fluorouridine-3'-phosphate
  modified_base 10: mod_base = OTHER; note = 2'-fluorouridine-3'-phosphate
  modified_base 11: mod_base = OTHER; note = 2'-fluorouridine-3'-phosphate
  modified_base 12: mod_base = OTHER; note = 2'-O-methylguanosine-3'-phosphate
  modified_base 13: mod_base = OTHER; note = 2'-O-methyluridine-3'-phosphate
  modified_base 14: mod_base = OTHER; note = 2'-O-methyladenosine-3'-phosphate
  modified_base 15: mod_base = OTHER; note = 2'-O-methyladenosine-3'-phosphate
  modified_base 16: mod_base = OTHER; note = 2'-O-methylcytidine-3'-phosphate
  modified_base 17: mod_base = OTHER; note = 2'-O-methyluridine-3'-phosphate
  modified_base 18: mod_base = OTHER; note = 2'-O-methyluridine-3'-phosphate
  modified_base 19: mod_base = OTHER; note = 2'-O-methyladenosine-3'-phosphorothioate
  modified_base 20: mod_base = OTHER; note = 2'-O-methoxyethyl(MOE) adenosine-3'-phosphorothioate
  modified_base 21: mod_base = OTHER; note = 2'-O-methoxyethyl(MOE) adenosine
gttttgcttttgtaacttaaa

SEQ ID NO: 841 - RNA, 21 nt, synthetic construct
  source 1..21: mol_type = other RNA
  modified_base 1: mod_base = OTHER; note = 2'-O-methoxyethyl(MOE) guanosine-3'-phosphorothioate
  modified_base 2: mod_base = OTHER; note = 2'-O-methoxyethyl(MOE)-thymidine(or 5-methyluridine)-3'- phosphorothioate
  modified_base 3: mod_base = OTHER; note = 2'-O-methyluridine-3'-phosphate
  modified_base 4: mod_base = OTHER; note = 2'-O-methyluridine-3'-phosphate
  modified_base 5: mod_base = OTHER; note = 2'-O-methyluridine-3'-phosphate
  modified_base 6: mod_base = OTHER; note = 2'-O-methylguanosine-3'-phosphate
  modified_base 7: mod_base = OTHER; note = 2'-fluorocytidine-3'-phosphate
  modified_base 8: mod_base = OTHER; note = 2'-O-methyluridine-3'-phosphate
  modified_base 9: mod_base = OTHER; note = 2'-fluorouridine-3'-phosphate
  modified_base 10: mod_base = OTHER; note = 2'-fluorouridine-3'-phosphate
  modified_base 11: mod_base = OTHER; note = 2'-fluorouridine-3'-phosphate
  modified_base 12: mod_base = OTHER; note = 2'-O-methylguanosine-3'-phosphate
  modified_base 13: mod_base = OTHER; note = 2'-O-methyluridine-3'-phosphate
  modified_base 14: mod_base = OTHER; note = 2'-O-methyladenosine-3'-phosphate
  modified_base 15: mod_base = OTHER; note = 2'-O-methyladenosine-3'-phosphate
  modified_base 16: mod_base = OTHER; note = 2'-O-methylcytidine-3'-phosphate
  modified_base 17: mod_base = OTHER; note = 2'-O-methyluridine-3'-phosphate
  modified_base 18: mod_base = OTHER; note = 2'-O-methyluridine-3'-phosphate
  modified_base 19: mod_base = OTHER; note = 2'-O-methylguanosine-3'-phosphorothioate
  modified_base 20: mod_base = OTHER; note = 2'-O-methoxyethyl(MOE) adenosine-3'-phosphorothioate
  modified_base 21: mod_base = OTHER; note = 2'-O-methoxyethyl(MOE) adenosine
gttttgcttttgtaacttgaa

SEQ ID NO: 842 - RNA, 21 nt, synthetic construct
  source 1..21: mol_type = other RNA
  modified_base 1: mod_base = OTHER; note = 2'-O-methoxyethyl(MOE) guanosine-3'-phosphorothioate
  modified_base 2: mod_base = OTHER; note = 2'-O-methoxyethyl(MOE)-thymidine(or 5-methyluridine)-3'- phosphorothioate
  modified_base 3: mod_base = OTHER; note = 2'-O-methyluridine-3'-phosphate
  modified_base 4: mod_base = OTHER; note = 2'-O-methyluridine-3'-phosphate
  modified_base 5: mod_base = OTHER; note = 2'-O-methyluridine-3'-phosphate
  modified_base 6: mod_base = OTHER; note = 2'-O-methylguanosine-3'-phosphate
  modified_base 7: mod_base = OTHER; note = 2'-fluorocytidine-3'-phosphate
  modified_base 8: mod_base = OTHER; note = 2'-O-methyluridine-3'-phosphate
  modified_base 9: mod_base = OTHER; note = 2'-fluorouridine-3'-phosphate
  modified_base 10: mod_base = OTHER; note = 2'-fluorouridine-3'-phosphate
  modified_base 11: mod_base = OTHER; note = 2'-fluorouridine-3'-phosphate
  modified_base 12: mod_base = OTHER; note = 2'-O-methylguanosine-3'-phosphate
  modified_base 13: mod_base = OTHER; note = 2'-O-methyluridine-3'-phosphate
  modified_base 14: mod_base = OTHER; note = 2'-O-methyladenosine-3'-phosphate
  modified_base 15: mod_base = OTHER; note = 2'-O-methyladenosine-3'-phosphate
  modified_base 16: mod_base = OTHER; note = 2'-O-methylcytidine-3'-phosphate
  modified_base 17: mod_base = OTHER; note = 2'-O-methyluridine-3'-phosphate
  modified_base 18: mod_base = OTHER; note = 2'-O-methyluridine-3'-phosphate
  modified_base 19: mod_base = OTHER; note = 2'-O-methylguanosine-3'-phosphorothioate
  modified_base 20: mod_base = OTHER; note = 2'-O-methoxyethyl(MOE) adenosine-3'-phosphorothioate
  modified_base 21: mod_base = OTHER; note = 2'-O-methoxyethyl(MOE) adenosine
gttttgcttttgtaacttgaa

SEQ ID NO: 843 - RNA, 21 nt, synthetic construct
  source 1..21: mol_type = other RNA
  modified_base 1: mod_base = OTHER; note = 2'-O-methoxyethyl(MOE) guanosine-3'-phosphorothioate
  modified_base 2: mod_base = OTHER; note = 2'-O-methoxyethyl(MOE)-thymidine(or 5-methyluridine)-3'- phosphorothioate
  modified_base 3: mod_base = OTHER; note = 2'-O-methyluridine-3'-phosphate
  modified_base 4: mod_base = OTHER; note = 2'-O-methyluridine-3'-phosphate
  modified_base 5: mod_base = OTHER; note = 2'-O-methyluridine-3'-phosphate
  modified_base 6: mod_base = OTHER; note = 2'-O-methylguanosine-3'-phosphate
  modified_base 7: mod_base = OTHER; note = 2'-fluorocytidine-3'-phosphate
  modified_base 8: mod_base = OTHER; note = 2'-O-methyluridine-3'-phosphate
  modified_base 9: mod_base = OTHER; note = 2'-fluorouridine-3'-phosphate
  modified_base 10: mod_base = OTHER; note = 2'-fluorouridine-3'-phosphate
  modified_base 11: mod_base = OTHER; note = 2'-fluorouridine-3'-phosphate
  modified_base 12: mod_base = OTHER; note = 2'-O-methylguanosine-3'-phosphate
  modified_base 13: mod_base = OTHER; note = 2'-O-methyluridine-3'-phosphate
  modified_base 14: mod_base = OTHER; note = 2'-O-methyladenosine-3'-phosphate
  modified_base 15: mod_base = OTHER; note = 2'-O-methyladenosine-3'-phosphate
  modified_base 16: mod_base = OTHER; note = 2'-O-methylcytidine-3'-phosphate
  modified_base 17: mod_base = OTHER; note = 2'-O-methyluridine-3'-phosphate
  modified_base 18: mod_base = OTHER; note = 2'-O-methyluridine-3'-phosphate
  modified_base 19: mod_base = OTHER; note = 2'-O-methylguanosine-3'-phosphorothioate
  modified_base 20: mod_base = OTHER; note = 2'-O-methoxyethyl(MOE) adenosine-3'-phosphorothioate
  modified_base 21: mod_base = OTHER; note = 2'-O-methoxyethyl(MOE) adenosine
gttttgcttttgtaacttgaa

SEQ ID NO: 844 - RNA, 21 nt, synthetic construct
  source 1..21: mol_type = other RNA
  modified_base 1: mod_base = OTHER; note = 2'-O-methoxyethyl(MOE) guanosine-3'-phosphorothioate
  modified_base 2: mod_base = OTHER; note = 2'-O-methoxyethyl(MOE)-thymidine(or 5-methyluridine)-3'- phosphorothioate
  modified_base 3: mod_base = OTHER; note = 2'-O-methyluridine-3'-phosphate
  modified_base 4: mod_base = OTHER; note = 2'-O-methyluridine-3'-phosphate
  modified_base 5: mod_base = OTHER; note = 2'-O-methyluridine-3'-phosphate
  modified_base 6: mod_base = OTHER; note = 2'-O-methylguanosine-3'-phosphate
  modified_base 7: mod_base = OTHER; note = 2'-fluorocytidine-3'-phosphate
  modified_base 8: mod_base = OTHER; note = 2'-O-methyluridine-3'-phosphate
  modified_base 9: mod_base = OTHER; note = 2'-fluorouridine-3'-phosphate
  modified_base 10: mod_base = OTHER; note = 2'-fluorouridine-3'-phosphate
  modified_base 11: mod_base = OTHER; note = 2'-fluorouridine-3'-phosphate
  modified_base 12: mod_base = OTHER; note = 2'-O-methylguanosine-3'-phosphate
  modified_base 13: mod_base = OTHER; note = 2'-O-methyluridine-3'-phosphate
  modified_base 14: mod_base = OTHER; note = 2'-O-methyladenosine-3'-phosphate
  modified_base 15: mod_base = OTHER; note = 2'-O-methyladenosine-3'-phosphate
  modified_base 16: mod_base = OTHER; note = 2'-O-methylcytidine-3'-phosphate
  modified_base 17: mod_base = OTHER; note = 2'-O-methyluridine-3'-phosphate
  modified_base 18: mod_base = OTHER; note = 2'-O-methyluridine-3'-phosphate
  modified_base 19: mod_base = OTHER; note = 2'-O-methylguanosine-3'-phosphorothioate
  modified_base 20: mod_base = OTHER; note = 2'-O-methoxyethyl(MOE) adenosine-3'-phosphorothioate
  modified_base 21: mod_base = OTHER; note = 2'-O-methoxyethyl(MOE) adenosine
gttttgcttttgtaacttgaa

SEQ ID NO: 845 - RNA, 21 nt, synthetic construct
  source 1..21: mol_type = other RNA
  modified_base 1: mod_base = OTHER; note = 2'-O-methoxyethyl(MOE) guanosine-3'-phosphorothioate
  modified_base 2: mod_base = OTHER; note = 2'-O-methoxyethyl(MOE)-thymidine(or 5-methyluridine)-3'- phosphorothioate
  modified_base 3: mod_base = OTHER; note = 2'-O-methyluridine-3'-phosphate
  modified_base 4: mod_base = OTHER; note = 2'-O-methyluridine-3'-phosphate
  modified_base 5: mod_base = OTHER; note = 2'-O-methyluridine-3'-phosphate
  modified_base 6: mod_base = OTHER; note = 2'-O-methylguanosine-3'-phosphate
  modified_base 7: mod_base = OTHER; note = 2'-fluorocytidine-3'-phosphate
  modified_base 8: mod_base = OTHER; note = 2'-O-methyluridine-3'-phosphate
  modified_base 9: mod_base = OTHER; note = 2'-fluorouridine-3'-phosphate
  modified_base 10: mod_base = OTHER; note = 2'-fluorouridine-3'-phosphate
  modified_base 11: mod_base = OTHER; note = 2'-fluorouridine-3'-phosphate
  modified_base 12: mod_base = OTHER; note = 2'-O-methylguanosine-3'-phosphate
  modified_base 13: mod_base = OTHER; note = 2'-O-methyluridine-3'-phosphate
  modified_base 14: mod_base = OTHER; note = 2'-O-methyladenosine-3'-phosphate
  modified_base 15: mod_base = OTHER; note = 2'-O-methyladenosine-3'-phosphate
  modified_base 16: mod_base = OTHER; note = 2'-O-methylcytidine-3'-phosphate
  modified_base 17: mod_base = OTHER; note = 2'-O-methyluridine-3'-phosphate
  modified_base 18: mod_base = OTHER; note = 2'-O-methyluridine-3'-phosphate
  modified_base 19: mod_base = OTHER; note = 2'-O-methylguanosine-3'-phosphorothioate
  modified_base 20: mod_base = OTHER; note = 2'-O-methoxyethyl(MOE) adenosine-3'-phosphorothioate
  modified_base 21: mod_base = OTHER; note = 2'-O-methoxyethyl(MOE) adenosine
gttttgcttttgtaacttgaa

SEQ ID NO: 846 - RNA, 23 nt, synthetic construct
  source 1..23: mol_type = other RNA
  modified_base 1: mod_base = OTHER; note = 2'-O-methyladenosine-3'-phosphorothioate
  modified_base 2: mod_base = OTHER; note = 2'-fluorocytidine-3'-phosphorothioate
  modified_base 3: mod_base = OTHER; note = 2'-O-methyladenosine-3'-phosphate
  modified_base 4: mod_base = OTHER; note = 2'-fluoroadenosine-3'-phosphate
  modified_base 5: mod_base = OTHER; note = 2'-fluoroadenosine-3'-phosphate
  modified_base 6: mod_base = OTHER; note = 2'-fluoroadenosine-3'-phosphate
  modified_base 7: mod_base = OTHER; note = 2'-O-methylguanosine-3'-phosphate
  modified_base 8: mod_base = OTHER; note = 2'-fluorocytidine-3'-phosphate
  modified_base 9: mod_base = OTHER; note = 2'-O-methyladenosine-3'-phosphate
  modified_base 10: mod_base = OTHER; note = 2'-fluoroadenosine-3'-phosphate
  modified_base 11: mod_base = OTHER; note = 2'-O-methyladenosine-3'-phosphate
  modified_base 12: mod_base = OTHER; note = 2'-fluoroadenosine-3'-phosphate
  modified_base 13: mod_base = OTHER; note = 2'-O-methylcytidine-3'-phosphate
  modified_base 14: mod_base = OTHER; note = 2'-fluoroadenosine-3'-phosphate
  modified_base 15: mod_base = OTHER; note = 2'-O-methylguanosine-3'-phosphate
  modified_base 16: mod_base = OTHER; note = 2'-fluoroguanosine-3'-phosphate
  modified_base 17: mod_base = OTHER; note = 2'-O-methyluridine-3'-phosphate
  modified_base 18: mod_base = OTHER; note = 2'-fluorocytidine-3'-phosphate
  modified_base 19: mod_base = OTHER; note = 2'-O-methyluridine-3'-phosphate
  modified_base 20: mod_base = OTHER; note = 2'-O-methyladenosine-3'-phosphate
  modified_base 21: mod_base = OTHER; note = 2'-O-methylguanosine-3'-phosphorothioate
  modified_base 22: mod_base = OTHER; note = 2'-O-methyladenosine-3'-phosphorothioate
  modified_base 23: mod_base = OTHER; note = 2'-O-methyladenosine
acaaaagcaaaacaggtctagaa

SEQ ID NO: 847 - RNA, 23 nt, synthetic construct
  source 1..23: mol_type = other RNA
  modified_base 1: mod_base = OTHER; note = 2'-O-methyladenosine-3'-phosphorothioate
  modified_base 2: mod_base = OTHER; note = 2'-fluorocytidine-3'-phosphorothioate
  modified_base 3: mod_base = OTHER; note = 2'-O-methyladenosine-3'-phosphate
  modified_base 4: mod_base = OTHER; note = 2'-O-methyladenosine-3'-phosphate
  modified_base 5: mod_base = OTHER; note = 2'-O-methyladenosine-3'-phosphate
  modified_base 6: mod_base = OTHER; note = 2'-fluoroadenosine-3'-phosphate
  modified_base 7: mod_base = OTHER; note = 2'-O-methylguanosine-3'-phosphate
  modified_base 8: mod_base = OTHER; note = 2'-O-methylcytidine-3'-phosphate
  modified_base 9: mod_base = OTHER; note = 2'-O-methyladenosine-3'-phosphate
  modified_base 10: mod_base = OTHER; note = 2'-O-methyladenosine-3'-phosphate
  modified_base 11: mod_base = OTHER; note = 2'-O-methyladenosine-3'-phosphate
  modified_base 12: mod_base = OTHER; note = 2'-O-methyladenosine-3'-phosphate
  modified_base 13: mod_base = OTHER; note = 2'-O-methylcytidine-3'-phosphate
  modified_base 14: mod_base = OTHER; note = 2'-fluoroadenosine-3'-phosphate
  modified_base 15: mod_base = OTHER; note = 2'-O-methylguanosine-3'-phosphate
  modified_base 16: mod_base = OTHER; note = 2'-fluoroguanosine-3'-phosphate
  modified_base 17: mod_base = OTHER; note = 2'-O-methyluridine-3'-phosphate
  modified_base 18: mod_base = OTHER; note = 2'-O-methylcytidine-3'-phosphate
  modified_base 19: mod_base = OTHER; note = 2'-O-methyluridine-3'-phosphate
  modified_base 20: mod_base = OTHER; note = 2'-O-methyladenosine-3'-phosphate
  modified_base 21: mod_base = OTHER; note = 2'-O-methylguanosine-3'-phosphorothioate
  modified_base 22: mod_base = OTHER; note = 2'-O-methyladenosine-3'-phosphorothioate
  modified_base 23: mod_base = OTHER; note = 2'-O-methyladenosine
acaaaagcaaaacaggtctagaa

SEQ ID NO: 848 - RNA, 23 nt, synthetic construct
  source 1..23: mol_type = other RNA
  modified_base 1: mod_base = OTHER; note 5'-(E)-vinylphosphonate-2'-O-methyladenosine-3'-phosphoroth ioate
  modified_base 2: mod_base = OTHER; note = 2'-fluorocytidine-3'-phosphorothioate
  modified_base 3: mod_base = OTHER; note = 2'-O-methyladenosine-3'-phosphate
  modified_base 4: mod_base = OTHER; note = 2'-O-methyladenosine-3'-phosphate
  modified_base 5: mod_base = OTHER; note = 2'-O-methyladenosine-3'-phosphate
  modified_base 6: mod_base = OTHER; note = 2'-fluoroadenosine-3'-phosphate
  modified_base 7: mod_base = OTHER; note = 2'-O-methylguanosine-3'-phosphate
  modified_base 8: mod_base = OTHER; note = 2'-O-methylcytidine-3'-phosphate
  modified_base 9: mod_base = OTHER; note = 2'-O-methyladenosine-3'-phosphate
  modified_base 10: mod_base = OTHER; note = 2'-O-methyladenosine-3'-phosphate
  modified_base 11: mod_base = OTHER; note = 2'-O-methyladenosine-3'-phosphate
  modified_base 12: mod_base = OTHER; note = 2'-O-methyladenosine-3'-phosphate
  modified_base 13: mod_base = OTHER; note = 2'-O-methylcytidine-3'-phosphate
  modified_base 14: mod_base = OTHER; note = 2'-fluoroadenosine-3'-phosphate
  modified_base 15: mod_base = OTHER; note = 2'-O-methylguanosine-3'-phosphate
  modified_base 16: mod_base = OTHER; note = 2'-fluoroguanosine-3'-phosphate
  modified_base 17: mod_base = OTHER; note = 2'-O-methyluridine-3'-phosphate
  modified_base 18: mod_base = OTHER; note = 2'-O-methylcytidine-3'-phosphate
  modified_base 19: mod_base = OTHER; note = 2'-O-methyluridine-3'-phosphate
  modified_base 20: mod_base = OTHER; note = 2'-O-methyladenosine-3'-phosphate
  modified_base 21: mod_base = OTHER; note = 2'-O-methylguanosine-3'-phosphorothioate
  modified_base 22: mod_base = OTHER; note = 2'-O-methyladenosine-3'-phosphorothioate
  modified_base 23: mod_base = OTHER; note = 2'-O-methyladenosine
acaaaagcaaaacaggtctagaa

SEQ ID NO: 849 - RNA, 23 nt, synthetic construct
  source 1..23: mol_type = other RNA
  modified_base 1: mod_base = OTHER; note 5'-(E)-vinylphosphonate-2'-O-methyladenosine-3'-phosphoroth ioate
  modified_base 2: mod_base = OTHER; note = 2'-fluorocytidine-3'-phosphorothioate
  modified_base 3: mod_base = OTHER; note = 2'-O-methyladenosine-3'-phosphate
  modified_base 4: mod_base = OTHER; note = 2'-O-methyladenosine-3'-phosphate
  modified_base 5: mod_base = OTHER; note = 2'-O-methyladenosine-3'-phosphate
  modified_base 6: mod_base = OTHER; note = 2'-fluoroadenosine-3'-phosphate
  modified_base 7: mod_base = OTHER; note = 2'-O-methylguanosine-3'-phosphate
  modified_base 8: mod_base = OTHER; note = 2'-O-methylcytidine-3'-phosphate
  modified_base 9: mod_base = OTHER; note = 2'-O-methyladenosine-3'-phosphate
  modified_base 10: mod_base = OTHER; note = 2'-O-methyladenosine-3'-phosphate
  modified_base 11: mod_base = OTHER; note = 2'-O-methyladenosine-3'-phosphate
  modified_base 12: mod_base = OTHER; note = 2'-O-methyladenosine-3'-phosphate
  modified_base 13: mod_base = OTHER; note = 2'-O-methylcytidine-3'-phosphate
  modified_base 14: mod_base = OTHER; note = 2'-fluoroadenosine-3'-phosphate
  modified_base 15: mod_base = OTHER; note = 2'-O-methylguanosine-3'-phosphate
  modified_base 16: mod_base = OTHER; note = 2'-fluoroguanosine-3'-phosphate
  modified_base 17: mod_base = OTHER; note = 2'-O-methyluridine-3'-phosphate
  modified_base 18: mod_base = OTHER; note = 2'-O-methylcytidine-3'-phosphate
  modified_base 19: mod_base = OTHER; note = 2'-O-methyluridine-3'-phosphate
  modified_base 20: mod_base = OTHER; note = 2'-O-methyladenosine-3'-phosphate
  modified_base 21: mod_base = OTHER; note = 2'-O-methylguanosine-3'-phosphorothioate
  modified_base 22: mod_base = OTHER; note = 2'-O-methyladenosine-3'-phosphorothioate
  modified_base 23: mod_base = OTHER; note = 2'-O-methyladenosine
acaaaagcaaaacaggtctagaa

SEQ ID NO: 850 - RNA, 23 nt, synthetic construct
  source 1..23: mol_type = other RNA
  modified_base 1: mod_base = OTHER; note = 2'-O-methyladenosine-3'-phosphorothioate
  modified_base 2: mod_base = OTHER; note = 2'-fluorocytidine-3'-phosphorothioate
  modified_base 3: mod_base = OTHER; note = 2'-O-methyladenosine-3'-phosphate
  modified_base 4: mod_base = OTHER; note = 2'-O-methyladenosine-3'-phosphate
  modified_base 5: mod_base = OTHER; note = 2'-O-methyladenosine-3'-phosphate
  modified_base 6: mod_base = OTHER; note = 2'-fluoroadenosine-3'-phosphate
  modified_base 7: mod_base = OTHER; note = 2'-O-methylguanosine-3'-phosphate
  modified_base 8: mod_base = OTHER; note = 2'-O-methylcytidine-3'-phosphate
  modified_base 9: mod_base = OTHER; note = 2'-O-methyladenosine-3'-phosphate
  modified_base 10: mod_base = OTHER; note = 2'-O-methyladenosine-3'-phosphate
  modified_base 11: mod_base = OTHER; note = 2'-O-methyladenosine-3'-phosphate
  modified_base 12: mod_base = OTHER; note = 2'-O-methyladenosine-3'-phosphate
  modified_base 13: mod_base = OTHER; note = 2'-O-methylcytidine-3'-phosphate
  modified_base 14: mod_base = OTHER; note = 2'-fluoroadenosine-3'-phosphate
  modified_base 15: mod_base = OTHER; note = 2'-O-methylguanosine-3'-phosphate
  modified_base 16: mod_base = OTHER; note = 2'-fluoroguanosine-3'-phosphate
  modified_base 17: mod_base = OTHER; note = 2'-O-methyluridine-3'-phosphate
  modified_base 18: mod_base = OTHER; note = 2'-O-methylcytidine-3'-phosphate
  modified_base 19: mod_base = OTHER; note = 2'-O-methyluridine-3'-phosphate
  modified_base 20: mod_base = OTHER; note = 2'-O-methyladenosine-3'-phosphate
  modified_base 21: mod_base = OTHER; note = 2'-O-methylguanosine-3'-phosphorothioate
  modified_base 22: mod_base = OTHER; note = 2'-O-methyladenosine-3'-phosphorothioate
  modified_base 23: mod_base = OTHER; note = 2'-O-methyladenosine
acaaaagcaaaacaggtctagaa

SEQ ID NO: 851 - RNA, 23 nt, synthetic construct
  source 1..23: mol_type = other RNA
  modified_base 1: mod_base = OTHER; note 5'-(E)-vinylphosphonate-2'-O-methyluridine-3'-phosphorothio ate
  modified_base 2: mod_base = OTHER; note = 2'-fluorocytidine-3'-phosphorothioate
  modified_base 3: mod_base = OTHER; note = 2'-O-methyladenosine-3'-phosphate
  modified_base 4: mod_base = OTHER; note = 2'-O-methyladenosine-3'-phosphate
  modified_base 5: mod_base = OTHER; note = 2'-O-methyladenosine-3'-phosphate
  modified_base 6: mod_base = OTHER; note = 2'-fluoroadenosine-3'-phosphate
  modified_base 7: mod_base = OTHER; note = 2'-O-methylguanosine-3'-phosphate
  modified_base 8: mod_base = OTHER; note = 2'-O-methylcytidine-3'-phosphate
  modified_base 9: mod_base = OTHER; note = 2'-O-methyladenosine-3'-phosphate
  modified_base 10: mod_base = OTHER; note = 2'-O-methyladenosine-3'-phosphate
  modified_base 11: mod_base = OTHER; note = 2'-O-methyladenosine-3'-phosphate
  modified_base 12: mod_base = OTHER; note = 2'-O-methyladenosine-3'-phosphate
  modified_base 13: mod_base = OTHER; note = 2'-O-methylcytidine-3'-phosphate
  modified_base 14: mod_base = OTHER; note = 2'-fluoroadenosine-3'-phosphate
  modified_base 15: mod_base = OTHER; note = 2'-O-methylguanosine-3'-phosphate
  modified_base 16: mod_base = OTHER; note = 2'-fluoroguanosine-3'-phosphate
  modified_base 17: mod_base = OTHER; note = 2'-O-methyluridine-3'-phosphate
  modified_base 18: mod_base = OTHER; note = 2'-O-methylcytidine-3'-phosphate
  modified_base 19: mod_base = OTHER; note = 2'-O-methyluridine-3'-phosphate
  modified_base 20: mod_base = OTHER; note = 2'-O-methyladenosine-3'-phosphate
  modified_base 21: mod_base = OTHER; note = 2'-O-methylguanosine-3'-phosphorothioate
  modified_base 22: mod_base = OTHER; note = 2'-O-methoxyethyl(MOE) adenosine-3'-phosphorothioate
  modified_base 23: mod_base = OTHER; note = 2'-O-methoxyethyl(MOE) adenosine
tcaaaagcaaaacaggtctagaa

SEQ ID NO: 852 - RNA, 23 nt, synthetic construct
  source 1..23: mol_type = other RNA
  modified_base 1: mod_base = OTHER; note = 2'-O-methyladenosine-3'-phosphorothioate
  modified_base 2: mod_base = OTHER; note = 2'-fluorocytidine-3'-phosphorothioate
  modified_base 3: mod_base = OTHER; note = 2'-O-methyladenosine-3'-phosphate
  modified_base 4: mod_base = OTHER; note = 2'-fluoroadenosine-3'-phosphate
  modified_base 5: mod_base = OTHER; note = 2'-fluoroadenosine-3'-phosphate
  modified_base 6: mod_base = OTHER; note = 2'-fluoroadenosine-3'-phosphate
  modified_base 7: mod_base = OTHER; note = 2'-O-methylguanosine-3'-phosphate
  modified_base 8: mod_base = OTHER; note = 2'-fluorocytidine-3'-phosphate
  modified_base 9: mod_base = OTHER; note = 2'-O-methyladenosine-3'-phosphate
  modified_base 10: mod_base = OTHER; note = 2'-fluoroadenosine-3'-phosphate
  modified_base 11: mod_base = OTHER; note = 2'-O-methyladenosine-3'-phosphate
  modified_base 12: mod_base = OTHER; note = 2'-fluoroadenosine-3'-phosphate
  modified_base 13: mod_base = OTHER; note = 2'-O-methylcytidine-3'-phosphate
  modified_base 14: mod_base = OTHER; note = 2'-fluoroadenosine-3'-phosphate
  modified_base 15: mod_base = OTHER; note = 2'-O-methylguanosine-3'-phosphate
  modified_base 16: mod_base = OTHER; note = 2'-fluoroguanosine-3'-phosphate
  modified_base 17: mod_base = OTHER; note = 2'-O-methyluridine-3'-phosphate
  modified_base 18: mod_base = OTHER; note = 2'-fluorocytidine-3'-phosphate
  modified_base 19: mod_base = OTHER; note = 2'-O-methyluridine-3'-phosphate
  modified_base 20: mod_base = OTHER; note = 2'-O-methyladenosine-3'-phosphate
  modified_base 21: mod_base = OTHER; note = 2'-O-methylguanosine-3'-phosphorothioate
  modified_base 22: mod_base = OTHER; note = 2'-O-methyladenosine-3'-phosphorothioate
  modified_base 23: mod_base = OTHER; note = 2'-O-methyladenosine
acaaaagcaaaacaggtctagaa

SEQ ID NO: 853 - RNA, 23 nt, synthetic construct
  source 1..23: mol_type = other RNA
  modified_base 1: mod_base = OTHER; note 5'-(E)-vinylphosphonate-2'-O-methyladenosine-3'-phosphoroth ioate
  modified_base 2: mod_base = OTHER; note = 2'-fluorocytidine-3'-phosphorothioate
  modified_base 3: mod_base = OTHER; note = 2'-O-methyladenosine-3'-phosphate
  modified_base 4: mod_base = OTHER; note = 2'-O-methyladenosine-3'-phosphate
  modified_base 5: mod_base = OTHER; note = 2'-O-methyladenosine-3'-phosphate
  modified_base 6: mod_base = OTHER; note = 2'-fluoroadenosine-3'-phosphate
  modified_base 7: mod_base = OTHER; note = 2'-O-methylguanosine-3'-phosphate
  modified_base 8: mod_base = OTHER; note = 2'-O-methylcytidine-3'-phosphate
  modified_base 9: mod_base = OTHER; note = 2'-O-methyladenosine-3'-phosphate
  modified_base 10: mod_base = OTHER; note = 2'-O-methyladenosine-3'-phosphate
  modified_base 11: mod_base = OTHER; note = 2'-O-methyladenosine-3'-phosphate
  modified_base 12: mod_base = OTHER; note = 2'-O-methyladenosine-3'-phosphate
  modified_base 13: mod_base = OTHER; note = 2'-O-methylcytidine-3'-phosphate
  modified_base 14: mod_base = OTHER; note = 2'-fluoroadenosine-3'-phosphate
  modified_base 15: mod_base = OTHER; note = 2'-O-methylguanosine-3'-phosphate
  modified_base 16: mod_base = OTHER; note = 2'-fluoroguanosine-3'-phosphate
  modified_base 17: mod_base = OTHER; note = 2'-O-methyluridine-3'-phosphate
  modified_base 18: mod_base = OTHER; note = 2'-O-methylcytidine-3'-phosphate
  modified_base 19: mod_base = OTHER; note = 2'-O-methyluridine-3'-phosphate
  modified_base 20: mod_base = OTHER; note = 2'-O-methyladenosine-3'-phosphate
  modified_base 21: mod_base = OTHER; note = 2'-O-methylguanosine-3'-phosphorothioate
  modified_base 22: mod_base = OTHER; note = 2'-O-methyladenosine-3'-phosphorothioate
  modified_base 23: mod_base = OTHER; note = 2'-O-methyladenosine
acaaaagcaaaacaggtctagaa

SEQ ID NO: 854 - RNA, 23 nt, synthetic construct
  source 1..23: mol_type = other RNA
  modified_base 1: mod_base = OTHER; note = 2'-O-methyladenosine-3'-phosphorothioate
  modified_base 2: mod_base = OTHER; note = 2'-fluorocytidine-3'-phosphorothioate
  modified_base 3: mod_base = OTHER; note = 2'-O-methyladenosine-3'-phosphate
  modified_base 4: mod_base = OTHER; note = 2'-O-methyladenosine-3'-phosphate
  modified_base 5: mod_base = OTHER; note = 2'-O-methyladenosine-3'-phosphate
  modified_base 6: mod_base = OTHER; note = 2'-fluoroadenosine-3'-phosphate
  modified_base 7: mod_base = OTHER; note = 2'-O-methylguanosine-3'-phosphate
  modified_base 8: mod_base = OTHER; note = 2'-O-methylcytidine-3'-phosphate
  modified_base 9: mod_base = OTHER; note = 2'-O-methyladenosine-3'-phosphate
  modified_base 10: mod_base = OTHER; note = 2'-O-methyladenosine-3'-phosphate
  modified_base 11: mod_base = OTHER; note = 2'-O-methyladenosine-3'-phosphate
  modified_base 12: mod_base = OTHER; note = 2'-O-methyladenosine-3'-phosphate
  modified_base 13: mod_base = OTHER; note = 2'-O-methylcytidine-3'-phosphate
  modified_base 14: mod_base = OTHER; note = 2'-fluoroadenosine-3'-phosphate
  modified_base 15: mod_base = OTHER; note = 2'-O-methylguanosine-3'-phosphate
  modified_base 16: mod_base = OTHER; note = 2'-fluoroguanosine-3'-phosphate
  modified_base 17: mod_base = OTHER; note = 2'-O-methyluridine-3'-phosphate
  modified_base 18: mod_base = OTHER; note = 2'-O-methylcytidine-3'-phosphate
  modified_base 19: mod_base = OTHER; note = 2'-O-methyluridine-3'-phosphate
  modified_base 20: mod_base = OTHER; note = 2'-O-methyladenosine-3'-phosphate
  modified_base 21: mod_base = OTHER; note = 2'-O-methylguanosine-3'-phosphorothioate
  modified_base 22: mod_base = OTHER; note = 2'-O-methyladenosine-3'-phosphorothioate
  modified_base 23: mod_base = OTHER; note = 2'-O-methyladenosine
acaaaagcaaaacaggtctagaa

SEQ ID NO: 855 - RNA, 23 nt, synthetic construct
  source 1..23: mol_type = other RNA
  modified_base 1: mod_base = OTHER; note 5'-(E)-vinylphosphonate-2'-O-methyladenosine-3'-phosphoroth ioate
  modified_base 2: mod_base = OTHER; note = 2'-fluorocytidine-3'-phosphorothioate
  modified_base 3: mod_base = OTHER; note = 2'-O-methyladenosine-3'-phosphate
  modified_base 4: mod_base = OTHER; note = 2'-O-methyladenosine-3'-phosphate
  modified_base 5: mod_base = OTHER; note = 2'-O-methyladenosine-3'-phosphate
  modified_base 6: mod_base = OTHER; note = 2'-fluoroadenosine-3'-phosphate
  modified_base 7: mod_base = OTHER; note = 2'-O-methylguanosine-3'-phosphate
  modified_base 8: mod_base = OTHER; note = 2'-O-methylcytidine-3'-phosphate
  modified_base 9: mod_base = OTHER; note = 2'-O-methyladenosine-3'-phosphate
  modified_base 10: mod_base = OTHER; note = 2'-O-methyladenosine-3'-phosphate
  modified_base 11: mod_base = OTHER; note = 2'-O-methyladenosine-3'-phosphate
  modified_base 12: mod_base = OTHER; note = 2'-O-methyladenosine-3'-phosphate
  modified_base 13: mod_base = OTHER; note = 2'-O-methylcytidine-3'-phosphate
  modified_base 14: mod_base = OTHER; note = 2'-fluoroadenosine-3'-phosphate
  modified_base 15: mod_base = OTHER; note = 2'-O-methylguanosine-3'-phosphate
  modified_base 16: mod_base = OTHER; note = 2'-fluoroguanosine-3'-phosphate
  modified_base 17: mod_base = OTHER; note = 2'-O-methyluridine-3'-phosphate
  modified_base 18: mod_base = OTHER; note = 2'-O-methylcytidine-3'-phosphate
  modified_base 19: mod_base = OTHER; note = 2'-O-methyluridine-3'-phosphate
  modified_base 20: mod_base = OTHER; note = 2'-O-methyladenosine-3'-phosphate
  modified_base 21: mod_base = OTHER; note = 2'-O-methylguanosine-3'-phosphorothioate
  modified_base 22: mod_base = OTHER; note = 2'-O-methyladenosine-3'-phosphorothioate
  modified_base 23: mod_base = OTHER; note = 2'-O-methyladenosine
acaaaagcaaaacaggtctagaa

SEQ ID NO: 856 - RNA, 23 nt, synthetic construct
  source 1..23: mol_type = other RNA
  modified_base 1: mod_base = OTHER; note 5'-(E)-vinylphosphonate-2'-O-methyluridine-3'-phosphorothio ate
  modified_base 2: mod_base = OTHER; note = 2'-fluorocytidine-3'-phosphorothioate
  modified_base 3: mod_base = OTHER; note = 2'-O-methyladenosine-3'-phosphate
  modified_base 4: mod_base = OTHER; note = 2'-O-methyladenosine-3'-phosphate
  modified_base 5: mod_base = OTHER; note = 2'-O-methyladenosine-3'-phosphate
  modified_base 6: mod_base = OTHER; note = 2'-fluoroadenosine-3'-phosphate
  modified_base 7: mod_base = OTHER; note = 2'-O-methylguanosine-3'-phosphate
  modified_base 8: mod_base = OTHER; note = 2'-O-methylcytidine-3'-phosphate
  modified_base 9: mod_base = OTHER; note = 2'-O-methyladenosine-3'-phosphate
  modified_base 10: mod_base = OTHER; note = 2'-O-methyladenosine-3'-phosphate
  modified_base 11: mod_base = OTHER; note = 2'-O-methyladenosine-3'-phosphate
  modified_base 12: mod_base = OTHER; note = 2'-O-methyladenosine-3'-phosphate
  modified_base 13: mod_base = OTHER; note = 2'-O-methylcytidine-3'-phosphate
  modified_base 14: mod_base = OTHER; note = 2'-fluoroadenosine-3'-phosphate
  modified_base 15: mod_base = OTHER; note = 2'-O-methylguanosine-3'-phosphate
  modified_base 16: mod_base = OTHER; note = 2'-fluoroguanosine-3'-phosphate
  modified_base 17: mod_base = OTHER; note = 2'-O-methyluridine-3'-phosphate
  modified_base 18: mod_base = OTHER; note = 2'-O-methylcytidine-3'-phosphate
  modified_base 19: mod_base = OTHER; note = 2'-O-methyluridine-3'-phosphate
  modified_base 20: mod_base = OTHER; note = 2'-O-methyladenosine-3'-phosphate
  modified_base 21: mod_base = OTHER; note = 2'-O-methylguanosine-3'-phosphorothioate
  modified_base 22: mod_base = OTHER; note = 2'-O-methyladenosine-3'-phosphorothioate
  modified_base 23: mod_base = OTHER; note = 2'-O-methyladenosine
tcaaaagcaaaacaggtctagaa

SEQ ID NO: 857 - RNA, 23 nt, synthetic construct
  source 1..23: mol_type = other RNA
  modified_base 1: mod_base = OTHER; note 5'-(E)-vinylphosphonate-2'-O-methyluridine-3'-phosphorothio ate
  modified_base 2: mod_base = OTHER; note = 2'-fluorocytidine-3'-phosphorothioate
  modified_base 3: mod_base = OTHER; note = 2'-O-methyladenosine-3'-phosphate
  modified_base 4: mod_base = OTHER; note = 2'-O-methyladenosine-3'-phosphate
  modified_base 5: mod_base = OTHER; note = 2'-O-methyladenosine-3'-phosphate
  modified_base 6: mod_base = OTHER; note = 2'-fluoroadenosine-3'-phosphate
  modified_base 7: mod_base = OTHER; note = 2'-O-methylguanosine-3'-phosphate
  modified_base 8: mod_base = OTHER; note = 2'-O-methylcytidine-3'-phosphate
  modified_base 9: mod_base = OTHER; note = 2'-O-methyladenosine-3'-phosphate
  modified_base 10: mod_base = OTHER; note = 2'-O-methyladenosine-3'-phosphate
  modified_base 11: mod_base = OTHER; note = 2'-O-methyladenosine-3'-phosphate
  modified_base 12: mod_base = OTHER; note = 2'-O-methyladenosine-3'-phosphate
  modified_base 13: mod_base = OTHER; note = 2'-O-methylcytidine-3'-phosphate
  modified_base 14: mod_base = OTHER; note = 2'-fluoroadenosine-3'-phosphate
  modified_base 15: mod_base = OTHER; note = 2'-O-methylguanosine-3'-phosphate
  modified_base 16: mod_base = OTHER; note = 2'-fluoroguanosine-3'-phosphate
  modified_base 17: mod_base = OTHER; note = 2'-O-methyluridine-3'-phosphate
  modified_base 18: mod_base = OTHER; note = 2'-O-methylcytidine-3'-phosphate
  modified_base 19: mod_base = OTHER; note = 2'-O-methyluridine-3'-phosphate
  modified_base 20: mod_base = OTHER; note = 2'-O-methyladenosine-3'-phosphate
  modified_base 21: mod_base = OTHER; note = 2'-O-methylguanosine-3'-phosphorothioate
  modified_base 22: mod_base = OTHER; note = 2'-O-methyladenosine-3'-phosphorothioate
  modified_base 23: mod_base = OTHER; note = 2'-O-methyladenosine
tcaaaagcaaaacaggtctagaa

SEQ ID NO: 858 - RNA, 23 nt, synthetic construct
  source 1..23: mol_type = other RNA
  modified_base 1: mod_base = OTHER; note 5'-(E)-vinylphosphonate-2'-O-methyladenosine-3'-phosphoroth ioate
  modified_base 2: mod_base = OTHER; note = 2'-fluorocytidine-3'-phosphorothioate
  modified_base 3: mod_base = OTHER; note = 2'-O-methyladenosine-3'-phosphate
  modified_base 4: mod_base = OTHER; note = 2'-O-methyladenosine-3'-phosphate
  modified_base 5: mod_base = OTHER; note = 2'-O-methyladenosine-3'-phosphate
  modified_base 6: mod_base = OTHER; note = 2'-fluoroadenosine-3'-phosphate
  modified_base 7: mod_base = OTHER; note = 2'-O-methylguanosine-3'-phosphate
  modified_base 8: mod_base = OTHER; note = 2'-O-methylcytidine-3'-phosphate
  modified_base 9: mod_base = OTHER; note = 2'-O-methyladenosine-3'-phosphate
  modified_base 10: mod_base = OTHER; note = 2'-O-methyladenosine-3'-phosphate
  modified_base 11: mod_base = OTHER; note = 2'-O-methyladenosine-3'-phosphate
  modified_base 12: mod_base = OTHER; note = 2'-O-methyladenosine-3'-phosphate
  modified_base 13: mod_base = OTHER; note = 2'-O-methylcytidine-3'-phosphate
  modified_base 14: mod_base = OTHER; note = 2'-fluoroadenosine-3'-phosphate
  modified_base 15: mod_base = OTHER; note = 2'-O-methylguanosine-3'-phosphate
  modified_base 16: mod_base = OTHER; note = 2'-fluoroguanosine-3'-phosphate
  modified_base 17: mod_base = OTHER; note = 2'-O-methyluridine-3'-phosphate
  modified_base 18: mod_base = OTHER; note = 2'-O-methylcytidine-3'-phosphate
  modified_base 19: mod_base = OTHER; note = 2'-O-methyluridine-3'-phosphate
  modified_base 20: mod_base = OTHER; note = 2'-O-methyladenosine-3'-phosphate
  modified_base 21: mod_base = OTHER; note = 2'-O-methylguanosine-3'-phosphorothioate
  modified_base 22: mod_base = OTHER; note = 2'-O-methyladenosine-3'-phosphorothioate
  modified_base 23: mod_base = OTHER; note = 2'-O-methyladenosine
acaaaagcaaaacaggtctagaa

SEQ ID NO: 859 - RNA, 23 nt, synthetic construct
  source 1..23: mol_type = other RNA
  modified_base 1: mod_base = OTHER; note 5'-(E)-vinylphosphonate-2'-O-methyladenosine-3'-phosphoroth ioate
  modified_base 2: mod_base = OTHER; note = 2'-fluorocytidine-3'-phosphorothioate
  modified_base 3: mod_base = OTHER; note = 2'-O-methyladenosine-3'-phosphate
  modified_base 4: mod_base = OTHER; note = 2'-O-methyladenosine-3'-phosphate
  modified_base 5: mod_base = OTHER; note = 2'-O-methyladenosine-3'-phosphate
  modified_base 6: mod_base = OTHER; note = 2'-fluoroadenosine-3'-phosphate
  modified_base 7: mod_base = OTHER; note = 2'-O-methylguanosine-3'-phosphate
  modified_base 8: mod_base = OTHER; note = 2'-O-methylcytidine-3'-phosphate
  modified_base 9: mod_base = OTHER; note = 2'-O-methyladenosine-3'-phosphate
  modified_base 10: mod_base = OTHER; note = 2'-O-methyladenosine-3'-phosphate
  modified_base 11: mod_base = OTHER; note = 2'-O-methyladenosine-3'-phosphate
  modified_base 12: mod_base = OTHER; note = 2'-O-methyladenosine-3'-phosphate
  modified_base 13: mod_base = OTHER; note = 2'-O-methylcytidine-3'-phosphate
  modified_base 14: mod_base = OTHER; note = 2'-fluoroadenosine-3'-phosphate
  modified_base 15: mod_base = OTHER; note = 2'-O-methylguanosine-3'-phosphate
  modified_base 16: mod_base = OTHER; note = 2'-fluoroguanosine-3'-phosphate
  modified_base 17: mod_base = OTHER; note = 2'-O-methyluridine-3'-phosphate
  modified_base 18: mod_base = OTHER; note = 2'-O-methylcytidine-3'-phosphate
  modified_base 19: mod_base = OTHER; note = 2'-O-methyluridine-3'-phosphate
  modified_base 20: mod_base = OTHER; note = 2'-O-methyladenosine-3'-phosphate
  modified_base 21: mod_base = OTHER; note = 2'-O-methylguanosine-3'-phosphorothioate
  modified_base 22: mod_base = OTHER; note = 2'-O-methyladenosine-3'-phosphorothioate
  modified_base 23: mod_base = OTHER; note = 2'-O-methyladenosine
acaaaagcaaaacaggtctagaa

SEQ ID NO: 860 - RNA, 23 nt, synthetic construct
  source 1..23: mol_type = other RNA
  modified_base 1: mod_base = OTHER; note 5'-(E)-vinylphosphonate-2'-O-methyladenosine-3'-phosphoroth ioate
  modified_base 2: mod_base = OTHER; note = 2'-fluorocytidine-3'-phosphorothioate
  modified_base 3: mod_base = OTHER; note = 2'-O-methyladenosine-3'-phosphate
  modified_base 4: mod_base = OTHER; note = 2'-O-methyladenosine-3'-phosphate
  modified_base 5: mod_base = OTHER; note = 2'-O-methyladenosine-3'-phosphate
  modified_base 6: mod_base = OTHER; note = 2'-fluoroadenosine-3'-phosphate
  modified_base 7: mod_base = OTHER; note = 2'-O-methylguanosine-3'-phosphate
  modified_base 8: mod_base = OTHER; note = 2'-O-methylcytidine-3'-phosphate
  modified_base 9: mod_base = OTHER; note = 2'-O-methyladenosine-3'-phosphate
  modified_base 10: mod_base = OTHER; note = 2'-O-methyladenosine-3'-phosphate
  modified_base 11: mod_base = OTHER; note = 2'-O-methyladenosine-3'-phosphate
  modified_base 12: mod_base = OTHER; note = 2'-O-methyladenosine-3'-phosphate
  modified_base 13: mod_base = OTHER; note = 2'-O-methylcytidine-3'-phosphate
  modified_base 14: mod_base = OTHER; note = 2'-fluoroadenosine-3'-phosphate
  modified_base 15: mod_base = OTHER; note = 2'-O-methylguanosine-3'-phosphate
  modified_base 16: mod_base = OTHER; note = 2'-fluoroguanosine-3'-phosphate
  modified_base 17: mod_base = OTHER; note = 2'-O-methyluridine-3'-phosphate
  modified_base 18: mod_base = OTHER; note = 2'-O-methylcytidine-3'-phosphate
  modified_base 19: mod_base = OTHER; note = 2'-O-methyluridine-3'-phosphate
  modified_base 20: mod_base = OTHER; note = 2'-O-methyladenosine-3'-phosphate
  modified_base 21: mod_base = OTHER; note = 2'-O-methylguanosine-3'-phosphorothioate
  modified_base 22: mod_base = OTHER; note = 2'-O-methyladenosine-3'-phosphorothioate
  modified_base 23: mod_base = OTHER; note = 2'-O-methyladenosine
acaaaagcaaaacaggtctagaa

SEQ ID NO: 861 - RNA, 23 nt, synthetic construct
  source 1..23: mol_type = other RNA
  modified_base 1: mod_base = OTHER; note = 2'-O-methyladenosine-3'-phosphorothioate
  modified_base 2: mod_base = OTHER; note = 2'-fluorocytidine-3'-phosphorothioate
  modified_base 3: mod_base = OTHER; note = 2'-O-methyladenosine-3'-phosphate
  modified_base 4: mod_base = OTHER; note = 2'-O-methyladenosine-3'-phosphate
  modified_base 5: mod_base = OTHER; note = 2'-O-methyladenosine-3'-phosphate
  modified_base 6: mod_base = OTHER; note = 2'-fluoroadenosine-3'-phosphate
  modified_base 7: mod_base = OTHER; note = 2'-O-methylguanosine-3'-phosphate
  modified_base 8: mod_base = OTHER; note = 2'-O-methylcytidine-3'-phosphate
  modified_base 9: mod_base = OTHER; note = 2'-O-methyladenosine-3'-phosphate
  modified_base 10: mod_base = OTHER; note = 2'-O-methyladenosine-3'-phosphate
  modified_base 11: mod_base = OTHER; note = 2'-O-methyladenosine-3'-phosphate
  modified_base 12: mod_base = OTHER; note = 2'-O-methyladenosine-3'-phosphate
  modified_base 13: mod_base = OTHER; note = 2'-O-methylcytidine-3'-phosphate
  modified_base 14: mod_base = OTHER; note = 2'-fluoroadenosine-3'-phosphate
  modified_base 15: mod_base = OTHER; note = 2'-O-methylguanosine-3'-phosphate
  modified_base 16: mod_base = OTHER; note = 2'-fluoroguanosine-3'-phosphate
  modified_base 17: mod_base = OTHER; note = 2'-O-methyluridine-3'-phosphate
  modified_base 18: mod_base = OTHER; note = 2'-O-methylcytidine-3'-phosphate
  modified_base 19: mod_base = OTHER; note = 2'-O-methyluridine-3'-phosphate
  modified_base 20: mod_base = OTHER; note = 2'-O-methyladenosine-3'-phosphate
  modified_base 21: mod_base = OTHER; note = 2'-O-methylguanosine-3'-phosphorothioate
  modified_base 22: mod_base = OTHER; note = 2'-O-methyladenosine-3'-phosphorothioate
  modified_base 23: mod_base = OTHER; note = 2'-O-methyladenosine
acaaaagcaaaacaggtctagaa

SEQ ID NO: 862 - RNA, 23 nt, synthetic construct
  source 1..23: mol_type = other RNA
  modified_base 1: mod_base = OTHER; note = 2'-O-methyladenosine-3'-phosphorothioate
  modified_base 2: mod_base = OTHER; note = 2'-fluorocytidine-3'-phosphorothioate
  modified_base 3: mod_base = OTHER; note = 2'-O-methyladenosine-3'-phosphate
  modified_base 4: mod_base = OTHER; note = 2'-O-methyladenosine-3'-phosphate
  modified_base 5: mod_base = OTHER; note = 2'-O-methyladenosine-3'-phosphate
  modified_base 6: mod_base = OTHER; note = 2'-fluoroadenosine-3'-phosphate
  modified_base 7: mod_base = OTHER; note = 2'-O-methylguanosine-3'-phosphate
  modified_base 8: mod_base = OTHER; note = 2'-O-methylcytidine-3'-phosphate
  modified_base 9: mod_base = OTHER; note = 2'-O-methyladenosine-3'-phosphate
  modified_base 10: mod_base = OTHER; note = 2'-O-methyladenosine-3'-phosphate
  modified_base 11: mod_base = OTHER; note = 2'-O-methyladenosine-3'-phosphate
  modified_base 12: mod_base = OTHER; note = 2'-O-methyladenosine-3'-phosphate
  modified_base 13: mod_base = OTHER; note = 2'-O-methylcytidine-3'-phosphate
  modified_base 14: mod_base = OTHER; note = 2'-fluoroadenosine-3'-phosphate
  modified_base 15: mod_base = OTHER; note = 2'-O-methylguanosine-3'-phosphate
  modified_base 16: mod_base = OTHER; note = 2'-fluoroguanosine-3'-phosphate
  modified_base 17: mod_base = OTHER; note = 2'-O-methyluridine-3'-phosphate
  modified_base 18: mod_base = OTHER; note = 2'-O-methylcytidine-3'-phosphate
  modified_base 19: mod_base = OTHER; note = 2'-O-methyluridine-3'-phosphate
  modified_base 20: mod_base = OTHER; note = 2'-O-methyladenosine-3'-phosphate
  modified_base 21: mod_base = OTHER; note = 2'-O-methylguanosine-3'-phosphorothioate
  modified_base 22: mod_base = OTHER; note = 2'-O-methyladenosine-3'-phosphorothioate
  modified_base 23: mod_base = OTHER; note = 2'-O-methyladenosine
acaaaagcaaaacaggtctagaa

SEQ ID NO: 863 - RNA, 23 nt, synthetic construct
  source 1..23: mol_type = other RNA
  modified_base 1: mod_base = OTHER; note 5'-(E)-vinylphosphonate-2'-O-methyladenosine-3'-phosphoroth ioate
  modified_base 2: mod_base = OTHER; note = 2'-fluorocytidine-3'-phosphorothioate
  modified_base 3: mod_base = OTHER; note = Adenine threose nucleic acid-2'-phosphate
  modified_base 4: mod_base = OTHER; note = 2'-O-methyladenosine-3'-phosphate
  modified_base 5: mod_base = OTHER; note = 2'-O-methyladenosine-3'-phosphate
  modified_base 6: mod_base = OTHER; note = 2'-fluoroadenosine-3'-phosphate
  modified_base 7: mod_base = OTHER; note = 2'-O-methylguanosine-3'-phosphate
  modified_base 8: mod_base = OTHER; note = 2'-O-methylcytidine-3'-phosphate
  modified_base 9: mod_base = OTHER; note = 2'-O-methyladenosine-3'-phosphate
  modified_base 10: mod_base = OTHER; note = 2'-O-methyladenosine-3'-phosphate
  modified_base 11: mod_base = OTHER; note = 2'-O-methyladenosine-3'-phosphate
  modified_base 12: mod_base = OTHER; note = 2'-O-methyladenosine-3'-phosphate
  modified_base 13: mod_base = OTHER; note = 2'-O-methylcytidine-3'-phosphate
  modified_base 14: mod_base = OTHER; note = 2'-fluoroadenosine-3'-phosphate
  modified_base 15: mod_base = OTHER; note = 2'-O-methylguanosine-3'-phosphate
  modified_base 16: mod_base = OTHER; note = 2'-fluoroguanosine-3'-phosphate
  modified_base 17: mod_base = OTHER; note = 2'-O-methyluridine-3'-phosphate
  modified_base 18: mod_base = OTHER; note = 2'-O-methylcytidine-3'-phosphate
  modified_base 19: mod_base = OTHER; note = 2'-O-methyluridine-3'-phosphate
  modified_base 20: mod_base = OTHER; note = 2'-O-methyladenosine-3'-phosphate
  modified_base 21: mod_base = OTHER; note = 2'-O-methylguanosine-3'-phosphorothioate
  modified_base 22: mod_base = OTHER; note = 2'-O-methyladenosine-3'-phosphorothioate
  modified_base 23: mod_base = OTHER; note = 2'-O-methyladenosine
acaaaagcaaaacaggtctagaa

SEQ ID NO: 864 - RNA, 23 nt, synthetic construct
  source 1..23: mol_type = other RNA
  modified_base 1: mod_base = OTHER; note 5'-(E)-vinylphosphonate-2'-O-methyladenosine-3'-phosphoroth ioate
  modified_base 2: mod_base = OTHER; note = 2'-fluorocytidine-3'-phosphorothioate
  modified_base 3: mod_base = OTHER; note = Adenine threose nucleic acid-2'-phosphate
  modified_base 4: mod_base = OTHER; note = 2'-O-methyladenosine-3'-phosphate
  modified_base 5: mod_base = OTHER; note = 2'-O-methyladenosine-3'-phosphate
  modified_base 6: mod_base = OTHER; note = 2'-fluoroadenosine-3'-phosphate
  modified_base 7: mod_base = OTHER; note = 2'-O-methylguanosine-3'-phosphate
  modified_base 8: mod_base = OTHER; note = 2'-O-methylcytidine-3'-phosphate
  modified_base 9: mod_base = OTHER; note = 2'-O-methyladenosine-3'-phosphate
  modified_base 10: mod_base = OTHER; note = 2'-O-methyladenosine-3'-phosphate
  modified_base 11: mod_base = OTHER; note = 2'-O-methyladenosine-3'-phosphate
  modified_base 12: mod_base = OTHER; note = 2'-O-methyladenosine-3'-phosphate
  modified_base 13: mod_base = OTHER; note = 2'-O-methylcytidine-3'-phosphate
  modified_base 14: mod_base = OTHER; note = 2'-fluoroadenosine-3'-phosphate
  modified_base 15: mod_base = OTHER; note = 2'-O-methylguanosine-3'-phosphate
  modified_base 16: mod_base = OTHER; note = 2'-fluoroguanosine-3'-phosphate
  modified_base 17: mod_base = OTHER; note = 2'-O-methyluridine-3'-phosphate
  modified_base 18: mod_base = OTHER; note = 2'-O-methylcytidine-3'-phosphate
  modified_base 19: mod_base = OTHER; note = 2'-O-methyluridine-3'-phosphate
  modified_base 20: mod_base = OTHER; note = 2'-O-methyladenosine-3'-phosphate
  modified_base 21: mod_base = OTHER; note = 2'-O-methylguanosine-3'-phosphorothioate
  modified_base 22: mod_base = OTHER; note = 2'-O-methyladenosine-3'-phosphorothioate
  modified_base 23: mod_base = OTHER; note = 2'-O-methyladenosine
acaaaagcaaaacaggtctagaa

SEQ ID NO: 865 - RNA, 23 nt, synthetic construct
  source 1..23: mol_type = other RNA
  modified_base 1: mod_base = OTHER; note 5'-(E)-vinylphosphonate-2'-O-methyladenosine-3'-phosphoroth ioate
  modified_base 2: mod_base = OTHER; note = 2'-fluorocytidine-3'-phosphorothioate
  modified_base 3: mod_base = OTHER; note = 2'-O-methyladenosine-3'-phosphate
  modified_base 4: mod_base = OTHER; note = 2'-O-methyladenosine-3'-phosphate
  modified_base 5: mod_base = OTHER; note = 2'-O-methyladenosine-3'-phosphate
  modified_base 6: mod_base = OTHER; note = 2'-fluoroadenosine-3'-phosphate
  modified_base 7: mod_base = OTHER; note = 2'-O-methylguanosine-3'-phosphate
  modified_base 8: mod_base = OTHER; note = 2'-O-methylcytidine-3'-phosphate
  modified_base 9: mod_base = OTHER; note = 2'-O-methyladenosine-3'-phosphate
  modified_base 10: mod_base = OTHER; note = 2'-O-methyladenosine-3'-phosphate
  modified_base 11: mod_base = OTHER; note = 2'-O-methyladenosine-3'-phosphate
  modified_base 12: mod_base = OTHER; note = 2'-O-methyladenosine-3'-phosphate
  modified_base 13: mod_base = OTHER; note = 2'-O-methylcytidine-3'-phosphate
  modified_base 14: mod_base = OTHER; note = 2'-fluoroadenosine-3'-phosphate
  modified_base 15: mod_base = OTHER; note = 2'-O-methylguanosine-3'-phosphate
  modified_base 16: mod_base = OTHER; note = 2'-fluoroguanosine-3'-phosphate
  modified_base 17: mod_base = OTHER; note = 2'-O-methyluridine-3'-phosphate
  modified_base 18: mod_base = OTHER; note = 2'-O-methylcytidine-3'-phosphate
  modified_base 19: mod_base = OTHER; note = 2'-O-methyluridine-3'-phosphate
  modified_base 20: mod_base = OTHER; note = 2'-O-methyladenosine-3'-phosphate
  modified_base 21: mod_base = OTHER; note = 2'-O-methylguanosine-3'-phosphorothioate
  modified_base 22: mod_base = OTHER; note = 2'-O-methyladenosine-3'-phosphorothioate
  modified_base 23: mod_base = OTHER; note = 2'-O-methyladenosine
acaaaagcaaaacaggtctagaa

SEQ ID NO: 866 - RNA, 23 nt, synthetic construct
  source 1..23: mol_type = other RNA
  modified_base 1: mod_base = OTHER; note 5'-(E)-vinylphosphonate-2'-O-methyladenosine-3'-phosphoroth ioate
  modified_base 2: mod_base = OTHER; note = 2'-fluorocytidine-3'-phosphorothioate
  modified_base 3: mod_base = OTHER; note = 2'-O-methyladenosine-3'-phosphate
  modified_base 4: mod_base = OTHER; note = 2'-O-methyladenosine-3'-phosphate
  modified_base 5: mod_base = OTHER; note = 2'-O-methyladenosine-3'-phosphate
  modified_base 6: mod_base = OTHER; note = 2'-fluoroadenosine-3'-phosphate
  modified_base 7: mod_base = OTHER; note = 2'-O-methylguanosine-3'-phosphate
  modified_base 8: mod_base = OTHER; note = 2'-O-methylcytidine-3'-phosphate
  modified_base 9: mod_base = OTHER; note = 2'-O-methyladenosine-3'-phosphate
  modified_base 10: mod_base = OTHER; note = 2'-O-methyladenosine-3'-phosphate
  modified_base 11: mod_base = OTHER; note = 2'-O-methyladenosine-3'-phosphate
  modified_base 12: mod_base = OTHER; note = 2'-O-methyladenosine-3'-phosphate
  modified_base 13: mod_base = OTHER; note = 2'-O-methylcytidine-3'-phosphate
  modified_base 14: mod_base = OTHER; note = 2'-fluoroadenosine-3'-phosphate
  modified_base 15: mod_base = OTHER; note = 2'-O-methylguanosine-3'-phosphate
  modified_base 16: mod_base = OTHER; note = 2'-fluoroguanosine-3'-phosphate
  modified_base 17: mod_base = OTHER; note = 2'-O-methyluridine-3'-phosphate
  modified_base 18: mod_base = OTHER; note = 2'-O-methylcytidine-3'-phosphate
  modified_base 19: mod_base = OTHER; note = 2'-O-methyluridine-3'-phosphate
  modified_base 20: mod_base = OTHER; note = 2'-O-methyladenosine-3'-phosphate
  modified_base 21: mod_base = OTHER; note = 2'-O-methylguanosine-3'-phosphorothioate
  modified_base 22: mod_base = OTHER; note = 2'-O-methyladenosine-3'-phosphorothioate
  modified_base 23: mod_base = OTHER; note = 2'-O-methyladenosine
acaaaagcaaaacaggtctagaa

SEQ ID NO: 867 - RNA, 23 nt, synthetic construct
  source 1..23: mol_type = other RNA
  modified_base 1: mod_base = OTHER; note 5'-(E)-vinylphosphonate-2'-O-methyladenosine-3'-phosphoroth ioate
  modified_base 2: mod_base = OTHER; note = 2'-fluorocytidine-3'-phosphorothioate
  modified_base 3: mod_base = OTHER; note = Adenine threose nucleic acid-2'-phosphate
  modified_base 4: mod_base = OTHER; note = 2'-O-methyladenosine-3'-phosphate
  modified_base 5: mod_base = OTHER; note = 2'-O-methyladenosine-3'-phosphate
  modified_base 6: mod_base = OTHER; note = 2'-fluoroadenosine-3'-phosphate
  modified_base 7: mod_base = OTHER; note = 2'-O-methylguanosine-3'-phosphate
  modified_base 8: mod_base = OTHER; note = 2'-O-methylcytidine-3'-phosphate
  modified_base 9: mod_base = OTHER; note = 2'-O-methyladenosine-3'-phosphate
  modified_base 10: mod_base = OTHER; note = 2'-O-methyladenosine-3'-phosphate
  modified_base 11: mod_base = OTHER; note = 2'-O-methyladenosine-3'-phosphate
  modified_base 12: mod_base = OTHER; note = 2'-O-methyladenosine-3'-phosphate
  modified_base 13: mod_base = OTHER; note = 2'-O-methylcytidine-3'-phosphate
  modified_base 14: mod_base = OTHER; note = 2'-fluoroadenosine-3'-phosphate
  modified_base 15: mod_base = OTHER; note = 2'-O-methylguanosine-3'-phosphate
  modified_base 16: mod_base = OTHER; note = 2'-fluoroguanosine-3'-phosphate
  modified_base 17: mod_base = OTHER; note = 2'-O-methyluridine-3'-phosphate
  modified_base 18: mod_base = OTHER; note = 2'-O-methylcytidine-3'-phosphate
  modified_base 19: mod_base = OTHER; note = 2'-O-methyluridine-3'-phosphate
  modified_base 20: mod_base = OTHER; note = 2'-O-methyladenosine-3'-phosphate
  modified_base 21: mod_base = OTHER; note = 2'-O-methylguanosine-3'-phosphorothioate
  modified_base 22: mod_base = OTHER; note = 2'-O-methyladenosine-3'-phosphorothioate
  modified_base 23: mod_base = OTHER; note = 2'-O-methyladenosine
acaaaagcaaaacaggtctagaa

SEQ ID NO: 868 - RNA, 23 nt, synthetic construct
  source 1..23: mol_type = other RNA
  modified_base 1: mod_base = OTHER; note 5'-(E)-vinylphosphonate-2'-O-methyladenosine-3'-phosphoroth ioate
  modified_base 2: mod_base = OTHER; note = 2'-fluorocytidine-3'-phosphorothioate
  modified_base 3: mod_base = OTHER; note = Adenine threose nucleic acid-2'-phosphate
  modified_base 4: mod_base = OTHER; note = 2'-O-methyladenosine-3'-phosphate
  modified_base 5: mod_base = OTHER; note = 2'-O-methyladenosine-3'-phosphate
  modified_base 6: mod_base = OTHER; note = 2'-fluoroadenosine-3'-phosphate
  modified_base 7: mod_base = OTHER; note = 2'-O-methylguanosine-3'-phosphate
  modified_base 8: mod_base = OTHER; note = 2'-O-methylcytidine-3'-phosphate
  modified_base 9: mod_base = OTHER; note = 2'-O-methyladenosine-3'-phosphate
  modified_base 10: mod_base = OTHER; note = 2'-O-methyladenosine-3'-phosphate
  modified_base 11: mod_base = OTHER; note = 2'-O-methyladenosine-3'-phosphate
  modified_base 12: mod_base = OTHER; note = 2'-O-methyladenosine-3'-phosphate
  modified_base 13: mod_base = OTHER; note = 2'-O-methylcytidine-3'-phosphate
  modified_base 14: mod_base = OTHER; note = 2'-fluoroadenosine-3'-phosphate
  modified_base 15: mod_base = OTHER; note = 2'-O-methylguanosine-3'-phosphate
  modified_base 16: mod_base = OTHER; note = 2'-fluoroguanosine-3'-phosphate
  modified_base 17: mod_base = OTHER; note = 2'-O-methyluridine-3'-phosphate
  modified_base 18: mod_base = OTHER; note = 2'-O-methylcytidine-3'-phosphate
  modified_base 19: mod_base = OTHER; note = 2'-O-methyluridine-3'-phosphate
  modified_base 20: mod_base = OTHER; note = 2'-O-methyladenosine-3'-phosphate
  modified_base 21: mod_base = OTHER; note = 2'-O-methylguanosine-3'-phosphorothioate
  modified_base 22: mod_base = OTHER; note = 2'-O-methyladenosine-3'-phosphorothioate
  modified_base 23: mod_base = OTHER; note = 2'-O-methyladenosine
acaaaagcaaaacaggtctagaa

SEQ ID NO: 869 - RNA, 23 nt, synthetic construct
  source 1..23: mol_type = other RNA
  modified_base 1: mod_base = OTHER; note 5'-(E)-vinylphosphonate-2'-O-methyluridine-3'-phosphorothio ate
  modified_base 2: mod_base = OTHER; note = 2'-fluoroadenosine-3'-phosphorothioate
  modified_base 3: mod_base = OTHER; note = 2'-O-methyladenosine-3'-phosphate
  modified_base 4: mod_base = OTHER; note = 2'-O-methyladenosine-3'-phosphate
  modified_base 5: mod_base = OTHER; note = 2'-O-methyladenosine-3'-phosphate
  modified_base 6: mod_base = OTHER; note = 2'-fluoroguanosine-3'-phosphate
  modified_base 7: mod_base = OTHER; note = 2'-O-methyladenosine-3'-phosphate
  modified_base 8: mod_base = OTHER; note = 2'-O-methyluridine-3'-phosphate
  modified_base 9: mod_base = OTHER; note = 2'-O-methyladenosine-3'-phosphate
  modified_base 10: mod_base = OTHER; note = 2'-O-methyladenosine-3'-phosphate
  modified_base 11: mod_base = OTHER; note = 2'-O-methyladenosine-3'-phosphate
  modified_base 12: mod_base = OTHER; note = 2'-O-methyluridine-3'-phosphate
  modified_base 13: mod_base = OTHER; note = 2'-O-methylguanosine-3'-phosphate
  modified_base 14: mod_base = OTHER; note = 2'-fluorouridine-3'-phosphate
  modified_base 15: mod_base = OTHER; note = 2'-O-methylcytidine-3'-phosphate
  modified_base 16: mod_base = OTHER; note = 2'-fluorouridine-3'-phosphate
  modified_base 17: mod_base = OTHER; note = 2'-O-methylguanosine-3'-phosphate
  modified_base 18: mod_base = OTHER; note = 2'-O-methylcytidine-3'-phosphate
  modified_base 19: mod_base = OTHER; note = 2'-O-methyluridine-3'-phosphate
  modified_base 20: mod_base = OTHER; note = 2'-O-methyluridine-3'-phosphate
  modified_base 21: mod_base = OTHER; note = 2'-O-methylguanosine-3'-phosphorothioate
  modified_base 22: mod_base = OTHER; note = 2'-O-methylcytidine-3'-phosphorothioate
  modified_base 23: mod_base = OTHER; note = 2'-O-methyluridine
taaaagataaatgtctgcttgct

SEQ ID NO: 870 - RNA, 23 nt, synthetic construct
  source 1..23: mol_type = other RNA
  modified_base 1: mod_base = OTHER; note 5'-(E)-vinylphosphonate-2'-O-methyladenosine-3'-phosphoroth ioate
  modified_base 2: mod_base = OTHER; note = 2'-fluoroadenosine-3'-phosphorothioate
  modified_base 3: mod_base = OTHER; note = 2'-O-methyladenosine-3'-phosphate
  modified_base 4: mod_base = OTHER; note = 2'-O-methyladenosine-3'-phosphate
  modified_base 5: mod_base = OTHER; note = 2'-O-methylcytidine-3'-phosphate
  modified_base 6: mod_base = OTHER; note = 2'-fluoroadenosine-3'-phosphate
  modified_base 7: mod_base = OTHER; note = 2'-O-methylguanosine-3'-phosphate
  modified_base 8: mod_base = OTHER; note = 2'-O-methylguanosine-3'-phosphate
  modified_base 9: mod_base = OTHER; note = 2'-O-methyluridine-3'-phosphate
  modified_base 10: mod_base = OTHER; note = 2'-O-methylcytidine-3'-phosphate
  modified_base 11: mod_base = OTHER; note = 2'-O-methyluridine-3'-phosphate
  modified_base 12: mod_base = OTHER; note = 2'-O-methyladenosine-3'-phosphate
  modified_base 13: mod_base = OTHER; note = 2'-O-methylguanosine-3'-phosphate
  modified_base 14: mod_base = OTHER; note = 2'-fluoroadenosine-3'-phosphate
  modified_base 15: mod_base = OTHER; note = 2'-O-methyladenosine-3'-phosphate
  modified_base 16: mod_base = OTHER; note = 2'-fluoroadenosine-3'-phosphate
  modified_base 17: mod_base = OTHER; note = 2'-O-methyladenosine-3'-phosphate
  modified_base 18: mod_base = OTHER; note = 2'-O-methylguanosine-3'-phosphate
  modified_base 19: mod_base = OTHER; note = 2'-O-methyluridine-3'-phosphate
  modified_base 20: mod_base = OTHER; note = 2'-O-methyluridine-3'-phosphate
  modified_base 21: mod_base = OTHER; note = 2'-O-methylguanosine-3'-phosphorothioate
  modified_base 22: mod_base = OTHER; note = 2'-O-methylguanosine-3'-phosphorothioate
  modified_base 23: mod_base = OTHER; note = 2'-O-methylcytidine
aaaacaggtctagaaaagttggc

SEQ ID NO: 871 - RNA, 23 nt, synthetic construct
  source 1..23: mol_type = other RNA
  modified_base 1: mod_base = OTHER; note 5'-(E)-vinylphosphonate-2'-O-methyladenosine-3'-phosphoroth ioate
  modified_base 2: mod_base = OTHER; note = 2'-fluorouridine-3'-phosphorothioate
  modified_base 3: mod_base = OTHER; note = 2'-O-methyladenosine-3'-phosphate
  modified_base 4: mod_base = OTHER; note = 2'-O-methyluridine-3'-phosphate
  modified_base 5: mod_base = OTHER; note = 2'-O-methylcytidine-3'-phosphate
  modified_base 6: mod_base = OTHER; note = 2'-fluorouridine-3'-phosphate
  modified_base 7: mod_base = OTHER; note = 2'-O-methyluridine-3'-phosphate
  modified_base 8: mod_base = OTHER; note = 2'-O-methylcytidine-3'-phosphate
  modified_base 9: mod_base = OTHER; note = 2'-O-methyladenosine-3'-phosphate
  modified_base 10: mod_base = OTHER; note = 2'-O-methyladenosine-3'-phosphate
  modified_base 11: mod_base = OTHER; note = 2'-O-methylguanosine-3'-phosphate
  modified_base 12: mod_base = OTHER; note = 2'-O-methyluridine-3'-phosphate
  modified_base 13: mod_base = OTHER; note = 2'-O-methyluridine-3'-phosphate
  modified_base 14: mod_base = OTHER; note = 2'-fluoroadenosine-3'-phosphate
  modified_base 15: mod_base = OTHER; note = 2'-O-methylcytidine-3'-phosphate
  modified_base 16: mod_base = OTHER; note = 2'-fluoroadenosine-3'-phosphate
  modified_base 17: mod_base = OTHER; note = 2'-O-methyladenosine-3'-phosphate
  modified_base 18: mod_base = OTHER; note = 2'-O-methyladenosine-3'-phosphate
  modified_base 19: mod_base = OTHER; note = 2'-O-methyladenosine-3'-phosphate
  modified_base 20: mod_base = OTHER; note = 2'-O-methylguanosine-3'-phosphate
  modified_base 21: mod_base = OTHER; note = 2'-O-methylcytidine-3'-phosphorothioate
  modified_base 22: mod_base = OTHER; note = 2'-O-methyladenosine-3'-phosphorothioate
  modified_base 23: mod_base = OTHER; note = 2'-O-methyladenosine
atatcttcaagttacaaaagcaa

SEQ ID NO: 872 - RNA, 23 nt, synthetic construct
  source 1..23: mol_type = other RNA
  modified_base 1: mod_base = OTHER; note 5'-(E)-vinylphosphonate-2'-O-methyluridine-3'-phosphorothio ate
  modified_base 2: mod_base = OTHER; note = 2'-fluorouridine-3'-phosphorothioate
  modified_base 3: mod_base = OTHER; note = 2'-O-methylcytidine-3'-phosphate
  modified_base 4: mod_base = OTHER; note = 2'-O-methylguanosine-3'-phosphate
  modified_base 5: mod_base = OTHER; note = 2'-O-methyladenosine-3'-phosphate
  modified_base 6: mod_base = OTHER; note = 2'-fluorocytidine-3'-phosphate
  modified_base 7: mod_base = OTHER; note = 2'-O-methyladenosine-3'-phosphate
  modified_base 8: mod_base = OTHER; note = 2'-O-methyluridine-3'-phosphate
  modified_base 9: mod_base = OTHER; note = 2'-O-methylguanosine-3'-phosphate
  modified_base 10: mod_base = OTHER; note = 2'-O-methylguanosine-3'-phosphate
  modified_base 11: mod_base = OTHER; note = 2'-O-methylguanosine-3'-phosphate
  modified_base 12: mod_base = OTHER; note = 2'-O-methylguanosine-3'-phosphate
  modified_base 13: mod_base = OTHER; note = 2'-O-methylcytidine-3'-phosphate
  modified_base 14: mod_base = OTHER; note = 2'-fluoroadenosine-3'-phosphate
  modified_base 15: mod_base = OTHER; note = 2'-O-methyladenosine-3'-phosphate
  modified_base 16: mod_base = OTHER; note = 2'-fluorocytidine-3'-phosphate
  modified_base 17: mod_base = OTHER; note = 2'-O-methyluridine-3'-phosphate
  modified_base 18: mod_base = OTHER; note = 2'-O-methyluridine-3'-phosphate
  modified_base 19: mod_base = OTHER; note = 2'-O-methylcytidine-3'-phosphate
  modified_base 20: mod_base = OTHER; note = 2'-O-methyladenosine-3'-phosphate
  modified_base 21: mod_base = OTHER; note = 2'-O-methyladenosine-3'-phosphorothioate
  modified_base 22: mod_base = OTHER; note = 2'-O-methylguanosine-3'-phosphorothioate
  modified_base 23: mod_base = OTHER; note = 2'-O-methylguanosine
ttcgacatggggcaacttcaagg

SEQ ID NO: 873 - RNA, 23 nt, synthetic construct
  source 1..23: mol_type = other RNA
  modified_base 1: mod_base = OTHER; note 5'-(E)-vinylphosphonate-2'-O-methyladenosine-3'-phosphoroth ioate
  modified_base 2: mod_base = OTHER; note = 2'-fluorouridine-3'-phosphorothioate
  modified_base 3: mod_base = OTHER; note = 2'-O-methyladenosine-3'-phosphate
  modified_base 4: mod_base = OTHER; note = 2'-O-methyladenosine-3'-phosphate
  modified_base 5: mod_base = OTHER; note = 2'-O-methyladenosine-3'-phosphate
  modified_base 6: mod_base = OTHER; note = 2'-fluorocytidine-3'-phosphate
  modified_base 7: mod_base = OTHER; note = 2'-O-methyluridine-3'-phosphate
  modified_base 8: mod_base = OTHER; note = 2'-O-methylcytidine-3'-phosphate
  modified_base 9: mod_base = OTHER; note = 2'-O-methylcytidine-3'-phosphate
  modified_base 10: mod_base = OTHER; note = 2'-O-methyladenosine-3'-phosphate
  modified_base 11: mod_base = OTHER; note = 2'-O-methylguanosine-3'-phosphate
  modified_base 12: mod_base = OTHER; note = 2'-O-methylguanosine-3'-phosphate
  modified_base 13: mod_base = OTHER; note = 2'-O-methylcytidine-3'-phosphate
  modified_base 14: mod_base = OTHER; note = 2'-fluorocytidine-3'-phosphate
  modified_base 15: mod_base = OTHER; note = 2'-O-methyluridine-3'-phosphate
  modified_base 16: mod_base = OTHER; note = 2'-fluoroadenosine-3'-phosphate
  modified_base 17: mod_base = OTHER; note = 2'-O-methyluridine-3'-phosphate
  modified_base 18: mod_base = OTHER; note = 2'-O-methylguanosine-3'-phosphate
  modified_base 19: mod_base = OTHER; note = 2'-O-methyladenosine-3'-phosphate
  modified_base 20: mod_base = OTHER; note = 2'-O-methylguanosine-3'-phosphate
  modified_base 21: mod_base = OTHER; note = 2'-O-methylguanosine-3'-phosphorothioate
  modified_base 22: mod_base = OTHER; note = 2'-O-methylguanosine-3'-phosphorothioate
  modified_base 23: mod_base = OTHER; note = 2'-O-methyluridine
ataaactccaggcctatgagggt

SEQ ID NO: 874 - RNA, 23 nt, synthetic construct
  source 1..23: mol_type = other RNA
  modified_base 1: mod_base = OTHER; note 5'-(E)-vinylphosphonate-2'-O-methyladenosine-3'-phosphoroth ioate
  modified_base 2: mod_base = OTHER; note = 2'-fluoroadenosine-3'-phosphorothioate
  modified_base 3: mod_base = OTHER; note = 2'-O-methylguanosine-3'-phosphate
  modified_base 4: mod_base = OTHER; note = 2'-O-methyluridine-3'-phosphate
  modified_base 5: mod_base = OTHER; note = 2'-O-methyladenosine-3'-phosphate
  modified_base 6: mod_base = OTHER; note = 2'-fluoroadenosine-3'-phosphate
  modified_base 7: mod_base = OTHER; note = 2'-O-methylguanosine-3'-phosphate
  modified_base 8: mod_base = OTHER; note = 2'-O-methyladenosine-3'-phosphate
  modified_base 9: mod_base = OTHER; note = 2'-O-methyladenosine-3'-phosphate
  modified_base 10: mod_base = OTHER; note = 2'-O-methylguanosine-3'-phosphate
  modified_base 11: mod_base = OTHER; note = 2'-O-methyladenosine-3'-phosphate
  modified_base 12: mod_base = OTHER; note = 2'-O-methylguanosine-3'-phosphate
  modified_base 13: mod_base = OTHER; note = 2'-O-methylguanosine-3'-phosphate
  modified_base 14: mod_base = OTHER; note = 2'-fluorocytidine-3'-phosphate
  modified_base 15: mod_base = OTHER; note = 2'-O-methyluridine-3'-phosphate
  modified_base 16: mod_base = OTHER; note = 2'-fluorouridine-3'-phosphate
  modified_base 17: mod_base = OTHER; note = 2'-O-methylguanosine-3'-phosphate
  modified_base 18: mod_base = OTHER; note = 2'-O-methylguanosine-3'-phosphate
  modified_base 19: mod_base = OTHER; note = 2'-O-methylcytidine-3'-phosphorothioate
  modified_base 20: mod_base = OTHER; note = 2'-O-methyluridine-3'-phosphorothioate
  modified_base 21: mod_base = OTHER; note = 2'-O-methyluridine-3'-phosphate
  modified_base 22: mod_base = OTHER; note = 2'-O-methylcytidine-3'-phosphate
  modified_base 23: mod_base = OTHER; note = 2'-O-methyladenosine
aagtaagaagaggcttggcttca

SEQ ID NO: 875 - RNA, 23 nt, synthetic construct
  source 1..23: mol_type = other RNA
  modified_base 1: mod_base = OTHER; note 5'-(E)-vinylphosphonate-2'-O-methyluridine-3'-phosphorothio ate
  modified_base 2: mod_base = OTHER; note = 2'-fluoroadenosine-3'-phosphorothioate
  modified_base 3: mod_base = OTHER; note = 2'-O-methyladenosine-3'-phosphate
  modified_base 4: mod_base = OTHER; note = 2'-O-methylguanosine-3'-phosphate
  modified_base 5: mod_base = OTHER; note = 2'-O-methyluridine-3'-phosphate
  modified_base 6: mod_base = OTHER; note = 2'-fluoroadenosine-3'-phosphate
  modified_base 7: mod_base = OTHER; note = 2'-O-methyladenosine-3'-phosphate
  modified_base 8: mod_base = OTHER; note = 2'-O-methylguanosine-3'-phosphate
  modified_base 9: mod_base = OTHER; note = 2'-O-methyladenosine-3'-phosphate
  modified_base 10: mod_base = OTHER; note = 2'-O-methyladenosine-3'-phosphate
  modified_base 11: mod_base = OTHER; note = 2'-O-methylguanosine-3'-phosphate
  modified_base 12: mod_base = OTHER; note = 2'-O-methyladenosine-3'-phosphate
  modified_base 13: mod_base = OTHER; note = 2'-O-methylguanosine-3'-phosphate
  modified_base 14: mod_base = OTHER; note = 2'-fluoroguanosine-3'-phosphate
  modified_base 15: mod_base = OTHER; note = 2'-O-methylcytidine-3'-phosphate
  modified_base 16: mod_base = OTHER; note = 2'-fluorouridine-3'-phosphate
  modified_base 17: mod_base = OTHER; note = 2'-O-methyluridine-3'-phosphate
  modified_base 18: mod_base = OTHER; note = 2'-O-methylguanosine-3'-phosphate
  modified_base 19: mod_base = OTHER; note = 2'-O-methylguanosine-3'-phosphate
  modified_base 20: mod_base = OTHER; note = 2'-O-methylcytidine-3'-phosphate
  modified_base 21: mod_base = OTHER; note = 2'-O-methyluridine-3'-phosphorothioate
  modified_base 22: mod_base = OTHER; note = 2'-O-methyluridine-3'-phosphorothioate
  modified_base 23: mod_base = OTHER; note = 2'-O-methylcytidine
taagtaagaagaggcttggcttc

SEQ ID NO: 876 - RNA, 23 nt, synthetic construct
  source 1..23: mol_type = other RNA
  modified_base 1: mod_base = OTHER; note 5'-(E)-vinylphosphonate-2'-O-methyladenosine-3'-phosphoroth ioate
  modified_base 2: mod_base = OTHER; note = 2'-fluoroadenosine-3'-phosphorothioate
  modified_base 3: mod_base = OTHER; note = 2'-O-methylguanosine-3'-phosphate
  modified_base 4: mod_base = OTHER; note = 2'-O-methylcytidine-3'-phosphate
  modified_base 5: mod_base = OTHER; note = 2'-O-methyladenosine-3'-phosphate
  modified_base 6: mod_base = OTHER; note = 2'-fluoroadenosine-3'-phosphate
  modified_base 7: mod_base = OTHER; note = 2'-O-methyladenosine-3'-phosphate
  modified_base 8: mod_base = OTHER; note = 2'-O-methyladenosine-3'-phosphate
  modified_base 9: mod_base = OTHER; note = 2'-O-methylcytidine-3'-phosphate
  modified_base 10: mod_base = OTHER; note = 2'-O-methyladenosine-3'-phosphate
  modified_base 11: mod_base = OTHER; note = 2'-O-methylguanosine-3'-phosphate
  modified_base 12: mod_base = OTHER; note = 2'-O-methylguanosine-3'-phosphate
  modified_base 13: mod_base = OTHER; note = 2'-O-methyluridine-3'-phosphate
  modified_base 14: mod_base = OTHER; note = 2'-fluorocytidine-3'-phosphate
  modified_base 15: mod_base = OTHER; note = 2'-O-methyluridine-3'-phosphate
  modified_base 16: mod_base = OTHER; note = 2'-fluoroadenosine-3'-phosphate
  modified_base 17: mod_base = OTHER; note = 2'-O-methylguanosine-3'-phosphate
  modified_base 18: mod_base = OTHER; note = 2'-O-methyladenosine-3'-phosphate
  modified_base 19: mod_base = OTHER; note = 2'-O-methyladenosine-3'-phosphorothioate
  modified_base 20: mod_base = OTHER; note = 2'-O-methyladenosine-3'-phosphorothioate
  modified_base 21: mod_base = OTHER; note = 2'-O-methyladenosine-3'-phosphate
  modified_base 22: mod_base = OTHER; note = 2'-O-methylguanosine-3'-phosphate
  modified_base 23: mod_base = OTHER; note = 2'-O-methyluridine
aagcaaaacaggtctagaaaagt

SEQ ID NO: 877 - RNA, 23 nt, synthetic construct
  source 1..23: mol_type = other RNA
  modified_base 1: mod_base = OTHER; note 5'-(E)-vinylphosphonate-2'-O-methyluridine-3'-phosphorothio ate
  modified_base 2: mod_base = OTHER; note = 2'-fluorouridine-3'-phosphorothioate
  modified_base 3: mod_base = OTHER; note = 2'-O-methyladenosine-3'-phosphate
  modified_base 4: mod_base = OTHER; note = 2'-O-methylcytidine-3'-phosphate
  modified_base 5: mod_base = OTHER; note = 2'-O-methyladenosine-3'-phosphate
  modified_base 6: mod_base = OTHER; note = 2'-fluoroadenosine-3'-phosphate
  modified_base 7: mod_base = OTHER; note = 2'-O-methyladenosine-3'-phosphate
  modified_base 8: mod_base = OTHER; note = 2'-O-methyladenosine-3'-phosphate
  modified_base 9: mod_base = OTHER; note = 2'-O-methylguanosine-3'-phosphate
  modified_base 10: mod_base = OTHER; note = 2'-O-methylcytidine-3'-phosphate
  modified_base 11: mod_base = OTHER; note = 2'-O-methyladenosine-3'-phosphate
  modified_base 12: mod_base = OTHER; note = 2'-O-methyladenosine-3'-phosphate
  modified_base 13: mod_base = OTHER; note = 2'-O-methyladenosine-3'-phosphate
  modified_base 14: mod_base = OTHER; note = 2'-fluoroadenosine-3'-phosphate
  modified_base 15: mod_base = OTHER; note = 2'-O-methylcytidine-3'-phosphate
  modified_base 16: mod_base = OTHER; note = 2'-fluoroadenosine-3'-phosphate
  modified_base 17: mod_base = OTHER; note = 2'-O-methylguanosine-3'-phosphate
  modified_base 18: mod_base = OTHER; note = 2'-O-methylguanosine-3'-phosphate
  modified_base 19: mod_base = OTHER; note = 2'-O-methyluridine-3'-phosphate
  modified_base 20: mod_base = OTHER; note = 2'-O-methylcytidine-3'-phosphate
  modified_base 21: mod_base = OTHER; note = 2'-O-methyluridine-3'-phosphorothioate
  modified_base 22: mod_base = OTHER; note = 2'-O-methyladenosine-3'-phosphorothioate
  modified_base 23: mod_base = OTHER; note = 2'-O-methylguanosine
ttacaaaagcaaaacaggtctag

SEQ ID NO: 878 - RNA, 23 nt, synthetic construct
  source 1..23: mol_type = other RNA
  modified_base 1: mod_base = OTHER; note 5'-(E)-vinylphosphonate-2'-O-methyladenosine-3'-phosphoroth ioate
  modified_base 2: mod_base = OTHER; note = 2'-fluorouridine-3'-phosphorothioate
  modified_base 3: mod_base = OTHER; note = 2'-O-methyladenosine-3'-phosphate
  modified_base 4: mod_base = OTHER; note = 2'-O-methyladenosine-3'-phosphate
  modified_base 5: mod_base = OTHER; note = 2'-O-methyladenosine-3'-phosphate
  modified_base 6: mod_base = OTHER; note = 2'-fluorouridine-3'-phosphate
  modified_base 7: mod_base = OTHER; note = 2'-O-methyladenosine-3'-phosphate
  modified_base 8: mod_base = OTHER; note = 2'-O-methyluridine-3'-phosphate
  modified_base 9: mod_base = OTHER; note = 2'-O-methylcytidine-3'-phosphate
  modified_base 10: mod_base = OTHER; note = 2'-O-methyluridine-3'-phosphate
  modified_base 11: mod_base = OTHER; note = 2'-O-methyluridine-3'-phosphate
  modified_base 12: mod_base = OTHER; note = 2'-O-methylcytidine-3'-phosphate
  modified_base 13: mod_base = OTHER; note = 2'-O-methyladenosine-3'-phosphate
  modified_base 14: mod_base = OTHER; note = 2'-fluoroadenosine-3'-phosphate
  modified_base 15: mod_base = OTHER; note = 2'-O-methylguanosine-3'-phosphate
  modified_base 16: mod_base = OTHER; note = 2'-fluorouridine-3'-phosphate
  modified_base 17: mod_base = OTHER; note = 2'-O-methyluridine-3'-phosphate
  modified_base 18: mod_base = OTHER; note = 2'-O-methyladenosine-3'-phosphate
  modified_base 19: mod_base = OTHER; note = 2'-O-methylcytidine-3'-phosphorothioate
  modified_base 20: mod_base = OTHER; note = 2'-O-methyladenosine-3'-phosphorothioate
  modified_base 21: mod_base = OTHER; note = 2'-O-methyladenosine-3'-phosphate
  modified_base 22: mod_base = OTHER; note = 2'-O-methyladenosine-3'-phosphate
  modified_base 23: mod_base = OTHER; note = 2'-O-methyladenosine
ataaatatcttcaagttacaaaa

SEQ ID NO: 879 - RNA, 23 nt, synthetic construct
  source 1..23: mol_type = other RNA
  modified_base 1: mod_base = OTHER; note 5'-(E)-vinylphosphonate-2'-O-methyluridine-3'-phosphorothio ate
  modified_base 2: mod_base = OTHER; note = 2'-fluorouridine-3'-phosphorothioate
  modified_base 3: mod_base = OTHER; note = 2'-O-methylcytidine-3'-phosphate
  modified_base 4: mod_base = OTHER; note = 2'-O-methyladenosine-3'-phosphate
  modified_base 5: mod_base = OTHER; note = 2'-O-methyladenosine-3'-phosphate
  modified_base 6: mod_base = OTHER; note = 2'-fluoroguanosine-3'-phosphate
  modified_base 7: mod_base = OTHER; note = 2'-O-methyluridine-3'-phosphate
  modified_base 8: mod_base = OTHER; note = 2'-O-methyluridine-3'-phosphate
  modified_base 9: mod_base = OTHER; note = 2'-O-methyladenosine-3'-phosphate
  modified_base 10: mod_base = OTHER; note = 2'-O-methylcytidine-3'-phosphate
  modified_base 11: mod_base = OTHER; note = 2'-O-methyladenosine-3'-phosphate
  modified_base 12: mod_base = OTHER; note = 2'-O-methyladenosine-3'-phosphate
  modified_base 13: mod_base = OTHER; note = 2'-O-methyladenosine-3'-phosphate
  modified_base 14: mod_base = OTHER; note = 2'-fluoroadenosine-3'-phosphate
  modified_base 15: mod_base = OTHER; note = 2'-O-methylguanosine-3'-phosphate
  modified_base 16: mod_base = OTHER; note = 2'-fluorocytidine-3'-phosphate
  modified_base 17: mod_base = OTHER; note = 2'-O-methyladenosine-3'-phosphate
  modified_base 18: mod_base = OTHER; note = 2'-O-methyladenosine-3'-phosphate
  modified_base 19: mod_base = OTHER; note = 2'-O-methyladenosine-3'-phosphate
  modified_base 20: mod_base = OTHER; note = 2'-O-methyladenosine-3'-phosphate
  modified_base 21: mod_base = OTHER; note = 2'-O-methylcytidine-3'-phosphorothioate
  modified_base 22: mod_base = OTHER; note = 2'-O-methyladenosine-3'-phosphorothioate
  modified_base 23: mod_base = OTHER; note = 2'-O-methylguanosine
ttcaagttacaaaagcaaaacag

SEQ ID NO: 880 - RNA, 23 nt, synthetic construct
  source 1..23: mol_type = other RNA
  modified_base 1: mod_base = OTHER; note 5'-(E)-vinylphosphonate-2'-O-methyladenosine-3'-phosphoroth ioate
  modified_base 2: mod_base = OTHER; note = 2'-fluoroadenosine-3'-phosphorothioate
  modified_base 3: mod_base = OTHER; note = 2'-O-methylguanosine-3'-phosphate
  modified_base 4: mod_base = OTHER; note = 2'-O-methylcytidine-3'-phosphate
  modified_base 5: mod_base = OTHER; note = 2'-O-methyladenosine-3'-phosphate
  modified_base 6: mod_base = OTHER; note = 2'-fluoroadenosine-3'-phosphate
  modified_base 7: mod_base = OTHER; note = 2'-O-methyladenosine-3'-phosphate
  modified_base 8: mod_base = OTHER; note = 2'-O-methyladenosine-3'-phosphate
  modified_base 9: mod_base = OTHER; note = 2'-O-methylcytidine-3'-phosphate
  modified_base 10: mod_base = OTHER; note = 2'-O-methyladenosine-3'-phosphate
  modified_base 11: mod_base = OTHER; note = 2'-O-methylguanosine-3'-phosphate
  modified_base 12: mod_base = OTHER; note = 2'-O-methylguanosine-3'-phosphate
  modified_base 13: mod_base = OTHER; note = 2'-O-methyluridine-3'-phosphate
  modified_base 14: mod_base = OTHER; note = 2'-fluorocytidine-3'-phosphate
  modified_base 15: mod_base = OTHER; note = 2'-O-methyluridine-3'-phosphate
  modified_base 16: mod_base = OTHER; note = 2'-fluoroadenosine-3'-phosphate
  modified_base 17: mod_base = OTHER; note = 2'-O-methylguanosine-3'-phosphate
  modified_base 18: mod_base = OTHER; note = 2'-O-methyladenosine-3'-phosphate
  modified_base 19: mod_base = OTHER; note = 2'-O-methyladenosine-3'-phosphorothioate
  modified_base 20: mod_base = OTHER; note = 2'-O-methyladenosine-3'-phosphorothioate
  modified_base 21: mod_base = OTHER; note = 2'-O-methyladenosine-3'-phosphate
  modified_base 22: mod_base = OTHER; note = 2'-O-methylguanosine-3'-phosphate
  modified_base 23: mod_base = OTHER; note = 2'-O-methyluridine
aagcaaaacaggtctagaaaagt

SEQ ID NO: 881 - RNA, 23 nt, synthetic construct
  source 1..23: mol_type = other RNA
  modified_base 1: mod_base = OTHER; note 5'-(E)-vinylphosphonate-2'-O-methyluridine-3'-phosphorothio ate
  modified_base 2: mod_base = OTHER; note = 2'-fluorouridine-3'-phosphorothioate
  modified_base 3: mod_base = OTHER; note = 2'-O-methyladenosine-3'-phosphate
  modified_base 4: mod_base = OTHER; note = 2'-O-methylcytidine-3'-phosphate
  modified_base 5: mod_base = OTHER; note = 2'-O-methyladenosine-3'-phosphate
  modified_base 6: mod_base = OTHER; note = 2'-fluoroadenosine-3'-phosphate
  modified_base 7: mod_base = OTHER; note = 2'-O-methyladenosine-3'-phosphate
  modified_base 8: mod_base = OTHER; note = 2'-O-methyladenosine-3'-phosphate
  modified_base 9: mod_base = OTHER; note = 2'-O-methylguanosine-3'-phosphate
  modified_base 10: mod_base = OTHER; note = 2'-O-methylcytidine-3'-phosphate
  modified_base 11: mod_base = OTHER; note = 2'-O-methyladenosine-3'-phosphate
  modified_base 12: mod_base = OTHER; note = 2'-O-methyladenosine-3'-phosphate
  modified_base 13: mod_base = OTHER; note = 2'-O-methyladenosine-3'-phosphate
  modified_base 14: mod_base = OTHER; note = 2'-fluoroadenosine-3'-phosphate
  modified_base 15: mod_base = OTHER; note = 2'-O-methylcytidine-3'-phosphate
  modified_base 16: mod_base = OTHER; note = 2'-fluoroadenosine-3'-phosphate
  modified_base 17: mod_base = OTHER; note = 2'-O-methylguanosine-3'-phosphate
  modified_base 18: mod_base = OTHER; note = 2'-O-methylguanosine-3'-phosphate
  modified_base 19: mod_base = OTHER; note = 2'-O-methyluridine-3'-phosphate
  modified_base 20: mod_base = OTHER; note = 2'-O-methylcytidine-3'-phosphate
  modified_base 21: mod_base = OTHER; note = 2'-O-methyluridine-3'-phosphorothioate
  modified_base 22: mod_base = OTHER; note = 2'-O-methyladenosine-3'-phosphorothioate
  modified_base 23: mod_base = OTHER; note = 2'-O-methylguanosine
ttacaaaagcaaaacaggtctag

SEQ ID NO: 882 - RNA, 23 nt, synthetic construct
  source 1..23: mol_type = other RNA
  modified_base 1: mod_base = OTHER; note 5'-(E)-vinylphosphonate-2'-O-methyladenosine-3'-phosphoroth ioate
  modified_base 2: mod_base = OTHER; note = 2'-fluorouridine-3'-phosphorothioate
  modified_base 3: mod_base = OTHER; note = 2'-O-methyladenosine-3'-phosphate
  modified_base 4: mod_base = OTHER; note = 2'-O-methyladenosine-3'-phosphate
  modified_base 5: mod_base = OTHER; note = 2'-O-methyladenosine-3'-phosphate
  modified_base 6: mod_base = OTHER; note = 2'-fluorouridine-3'-phosphate
  modified_base 7: mod_base = OTHER; note = 2'-O-methyladenosine-3'-phosphate
  modified_base 8: mod_base = OTHER; note = 2'-O-methyluridine-3'-phosphate
  modified_base 9: mod_base = OTHER; note = 2'-O-methylcytidine-3'-phosphate
  modified_base 10: mod_base = OTHER; note = 2'-O-methyluridine-3'-phosphate
  modified_base 11: mod_base = OTHER; note = 2'-O-methyluridine-3'-phosphate
  modified_base 12: mod_base = OTHER; note = 2'-O-methylcytidine-3'-phosphate
  modified_base 13: mod_base = OTHER; note = 2'-O-methyladenosine-3'-phosphate
  modified_base 14: mod_base = OTHER; note = 2'-fluoroadenosine-3'-phosphate
  modified_base 15: mod_base = OTHER; note = 2'-O-methylguanosine-3'-phosphate
  modified_base 16: mod_base = OTHER; note = 2'-fluorouridine-3'-phosphate
  modified_base 17: mod_base = OTHER; note = 2'-O-methyluridine-3'-phosphate
  modified_base 18: mod_base = OTHER; note = 2'-O-methyladenosine-3'-phosphate
  modified_base 19: mod_base = OTHER; note = 2'-O-methylcytidine-3'-phosphorothioate
  modified_base 20: mod_base = OTHER; note = 2'-O-methyladenosine-3'-phosphorothioate
  modified_base 21: mod_base = OTHER; note = 2'-O-methyladenosine-3'-phosphate
  modified_base 22: mod_base = OTHER; note = 2'-O-methyladenosine-3'-phosphate
  modified_base 23: mod_base = OTHER; note = 2'-O-methyladenosine
ataaatatcttcaagttacaaaa

SEQ ID NO: 883 - RNA, 23 nt, synthetic construct
  source 1..23: mol_type = other RNA
  modified_base 1: mod_base = OTHER; note 5'-(E)-vinylphosphonate-2'-O-methyluridine-3'-phosphorothio ate
  modified_base 2: mod_base = OTHER; note = 2'-fluorouridine-3'-phosphorothioate
  modified_base 3: mod_base = OTHER; note = 2'-O-methylcytidine-3'-phosphate
  modified_base 4: mod_base = OTHER; note = 2'-O-methyladenosine-3'-phosphate
  modified_base 5: mod_base = OTHER; note = 2'-O-methyladenosine-3'-phosphate
  modified_base 6: mod_base = OTHER; note = 2'-fluoroguanosine-3'-phosphate
  modified_base 7: mod_base = OTHER; note = 2'-O-methyluridine-3'-phosphate
  modified_base 8: mod_base = OTHER; note = 2'-O-methyluridine-3'-phosphate
  modified_base 9: mod_base = OTHER; note = 2'-O-methyladenosine-3'-phosphate
  modified_base 10: mod_base = OTHER; note = 2'-O-methylcytidine-3'-phosphate
  modified_base 11: mod_base = OTHER; note = 2'-O-methyladenosine-3'-phosphate
  modified_base 12: mod_base = OTHER; note = 2'-O-methyladenosine-3'-phosphate
  modified_base 13: mod_base = OTHER; note = 2'-O-methyladenosine-3'-phosphate
  modified_base 14: mod_base = OTHER; note = 2'-fluoroadenosine-3'-phosphate
  modified_base 15: mod_base = OTHER; note = 2'-O-methylguanosine-3'-phosphate
  modified_base 16: mod_base = OTHER; note = 2'-fluorocytidine-3'-phosphate
  modified_base 17: mod_base = OTHER; note = 2'-O-methyladenosine-3'-phosphate
  modified_base 18: mod_base = OTHER; note = 2'-O-methyladenosine-3'-phosphate
  modified_base 19: mod_base = OTHER; note = 2'-O-methyladenosine-3'-phosphate
  modified_base 20: mod_base = OTHER; note = 2'-O-methyladenosine-3'-phosphate
  modified_base 21: mod_base = OTHER; note = 2'-O-methylcytidine-3'-phosphorothioate
  modified_base 22: mod_base = OTHER; note = 2'-O-methyladenosine-3'-phosphorothioate
  modified_base 23: mod_base = OTHER; note = 2'-O-methylguanosine
ttcaagttacaaaagcaaaacag

SEQ ID NO: 884 - RNA, 23 nt, synthetic construct
  source 1..23: mol_type = other RNA
  modified_base 1: mod_base = OTHER; note 5'-(E)-vinylphosphonate-2'-O-methyluridine-3'-phosphorothio ate
  modified_base 2: mod_base = OTHER; note = 2'-fluorouridine-3'-phosphorothioate
  modified_base 3: mod_base = OTHER; note = 2'-O-methylcytidine-3'-phosphate
  modified_base 4: mod_base = OTHER; note = 2'-O-methyladenosine-3'-phosphate
  modified_base 5: mod_base = OTHER; note = Adenine glycol nucleic acid-2'-phosphate
  modified_base 6: mod_base = OTHER; note = 2'-fluoroguanosine-3'-phosphate
  modified_base 7: mod_base = OTHER; note = 2'-O-methyluridine-3'-phosphate
  modified_base 8: mod_base = OTHER; note = 2'-O-methyluridine-3'-phosphate
  modified_base 9: mod_base = OTHER; note = 2'-O-methyladenosine-3'-phosphate
  modified_base 10: mod_base = OTHER; note = 2'-O-methylcytidine-3'-phosphate
  modified_base 11: mod_base = OTHER; note = 2'-O-methyladenosine-3'-phosphate
  modified_base 12: mod_base = OTHER; note = 2'-O-methyladenosine-3'-phosphate
  modified_base 13: mod_base = OTHER; note = 2'-O-methyladenosine-3'-phosphate
  modified_base 14: mod_base = OTHER; note = 2'-fluoroadenosine-3'-phosphate
  modified_base 15: mod_base = OTHER; note = 2'-O-methylguanosine-3'-phosphate
  modified_base 16: mod_base = OTHER; note = 2'-fluorocytidine-3'-phosphate
  modified_base 17: mod_base = OTHER; note = 2'-O-methyladenosine-3'-phosphate
  modified_base 18: mod_base = OTHER; note = 2'-O-methyladenosine-3'-phosphate
  modified_base 19: mod_base = OTHER; note = 2'-O-methyladenosine-3'-phosphate
  modified_base 20: mod_base = OTHER; note = 2'-O-methyladenosine-3'-phosphate
  modified_base 21: mod_base = OTHER; note = 2'-O-methylcytidine-3'-phosphorothioate
  modified_base 22: mod_base = OTHER; note = 2'-O-methyladenosine-3'-phosphorothioate
  modified_base 23: mod_base = OTHER; note = 2'-O-methylguanosine
ttcaagttacaaaagcaaaacag

SEQ ID NO: 885 - RNA, 23 nt, synthetic construct
  source 1..23: mol_type = other RNA
  modified_base 1: mod_base = OTHER; note 5'-(E)-vinylphosphonate-2'-O-methyluridine-3'-phosphorothio ate
  modified_base 2: mod_base = OTHER; note = 2'-fluorouridine-3'-phosphorothioate
  modified_base 3: mod_base = OTHER; note = 2'-O-methylcytidine-3'-phosphate
  modified_base 4: mod_base = OTHER; note = 2'-O-methyladenosine-3'-phosphate
  modified_base 5: mod_base = OTHER; note = 2'-O-methyladenosine-3'-phosphate
  modified_base 6: mod_base = OTHER; note = Guanine glycol nucleic acid-2'-phosphate
  modified_base 7: mod_base = OTHER; note = 2'-O-methyluridine-3'-phosphate
  modified_base 8: mod_base = OTHER; note = 2'-O-methyluridine-3'-phosphate
  modified_base 9: mod_base = OTHER; note = 2'-O-methyladenosine-3'-phosphate
  modified_base 10: mod_base = OTHER; note = 2'-O-methylcytidine-3'-phosphate
  modified_base 11: mod_base = OTHER; note = 2'-O-methyladenosine-3'-phosphate
  modified_base 12: mod_base = OTHER; note = 2'-O-methyladenosine-3'-phosphate
  modified_base 13: mod_base = OTHER; note = 2'-O-methyladenosine-3'-phosphate
  modified_base 14: mod_base = OTHER; note = 2'-fluoroadenosine-3'-phosphate
  modified_base 15: mod_base = OTHER; note = 2'-O-methylguanosine-3'-phosphate
  modified_base 16: mod_base = OTHER; note = 2'-fluorocytidine-3'-phosphate
  modified_base 17: mod_base = OTHER; note = 2'-O-methyladenosine-3'-phosphate
  modified_base 18: mod_base = OTHER; note = 2'-O-methyladenosine-3'-phosphate
  modified_base 19: mod_base = OTHER; note = 2'-O-methyladenosine-3'-phosphate
  modified_base 20: mod_base = OTHER; note = 2'-O-methyladenosine-3'-phosphate
  modified_base 21: mod_base = OTHER; note = 2'-O-methylcytidine-3'-phosphorothioate
  modified_base 22: mod_base = OTHER; note = 2'-O-methyladenosine-3'-phosphorothioate
  modified_base 23: mod_base = OTHER; note = 2'-O-methylguanosine
ttcaagttacaaaagcaaaacag

SEQ ID NO: 886 - RNA, 23 nt, synthetic construct
  source 1..23: mol_type = other RNA
  modified_base 1: mod_base = OTHER; note 5'-(E)-vinylphosphonate-2'-O-methyluridine-3'-phosphorothio ate
  modified_base 2: mod_base = OTHER; note = 2'-fluorouridine-3'-phosphorothioate
  modified_base 3: mod_base = OTHER; note = 2'-O-methylcytidine-3'-phosphate
  modified_base 4: mod_base = OTHER; note = 2'-O-methyladenosine-3'-phosphate
  modified_base 5: mod_base = OTHER; note = 2'-O-methyladenosine-3'-phosphate
  modified_base 6: mod_base = OTHER; note = 2'-fluoroguanosine-3'-phosphate
  modified_base 7: mod_base = OTHER; note = Uracil glycol nucleic acid-2'-phosphate
  modified_base 8: mod_base = OTHER; note = 2'-O-methyluridine-3'-phosphate
  modified_base 9: mod_base = OTHER; note = 2'-O-methyladenosine-3'-phosphate
  modified_base 10: mod_base = OTHER; note = 2'-O-methylcytidine-3'-phosphate
  modified_base 11: mod_base = OTHER; note = 2'-O-methyladenosine-3'-phosphate
  modified_base 12: mod_base = OTHER; note = 2'-O-methyladenosine-3'-phosphate
  modified_base 13: mod_base = OTHER; note = 2'-O-methyladenosine-3'-phosphate
  modified_base 14: mod_base = OTHER; note = 2'-fluoroadenosine-3'-phosphate
  modified_base 15: mod_base = OTHER; note = 2'-O-methylguanosine-3'-phosphate
  modified_base 16: mod_base = OTHER; note = 2'-fluorocytidine-3'-phosphate
  modified_base 17: mod_base = OTHER; note = 2'-O-methyladenosine-3'-phosphate
  modified_base 18: mod_base = OTHER; note = 2'-O-methyladenosine-3'-phosphate
  modified_base 19: mod_base = OTHER; note = 2'-O-methyladenosine-3'-phosphate
  modified_base 20: mod_base = OTHER; note = 2'-O-methyladenosine-3'-phosphate
  modified_base 21: mod_base = OTHER; note = 2'-O-methylcytidine-3'-phosphorothioate
  modified_base 22: mod_base = OTHER; note = 2'-O-methyladenosine-3'-phosphorothioate
  modified_base 23: mod_base = OTHER; note = 2'-O-methylguanosine
ttcaagttacaaaagcaaaacag

SEQ ID NO: 887 - RNA, 23 nt, synthetic construct
  source 1..23: mol_type = other RNA
  modified_base 1: mod_base = OTHER; note 5'-(E)-vinylphosphonate-2'-O-methyluridine-3'-phosphorothio ate
  modified_base 2: mod_base = OTHER; note = 2'-fluorouridine-3'-phosphorothioate
  modified_base 3: mod_base = OTHER; note = 2'-O-methylcytidine-3'-phosphate
  modified_base 4: mod_base = OTHER; note = 2'-O-methyladenosine-3'-phosphate
  modified_base 5: mod_base = OTHER; note = Adenine threose nucleic acid-2'-phosphate
  modified_base 6: mod_base = OTHER; note = 2'-fluoroguanosine-3'-phosphate
  modified_base 7: mod_base = OTHER; note = 2'-O-methyluridine-3'-phosphate
  modified_base 8: mod_base = OTHER; note = 2'-O-methyluridine-3'-phosphate
  modified_base 9: mod_base = OTHER; note = 2'-O-methyladenosine-3'-phosphate
  modified_base 10: mod_base = OTHER; note = 2'-O-methylcytidine-3'-phosphate
  modified_base 11: mod_base = OTHER; note = 2'-O-methyladenosine-3'-phosphate
  modified_base 12: mod_base = OTHER; note = 2'-O-methyladenosine-3'-phosphate
  modified_base 13: mod_base = OTHER; note = 2'-O-methyladenosine-3'-phosphate
  modified_base 14: mod_base = OTHER; note = 2'-fluoroadenosine-3'-phosphate
  modified_base 15: mod_base = OTHER; note = 2'-O-methylguanosine-3'-phosphate
  modified_base 16: mod_base = OTHER; note = 2'-fluorocytidine-3'-phosphate
  modified_base 17: mod_base = OTHER; note = 2'-O-methyladenosine-3'-phosphate
  modified_base 18: mod_base = OTHER; note = 2'-O-methyladenosine-3'-phosphate
  modified_base 19: mod_base = OTHER; note = 2'-O-methyladenosine-3'-phosphate
  modified_base 20: mod_base = OTHER; note = 2'-O-methyladenosine-3'-phosphate
  modified_base 21: mod_base = OTHER; note = 2'-O-methylcytidine-3'-phosphorothioate
  modified_base 22: mod_base = OTHER; note = 2'-O-methyladenosine-3'-phosphorothioate
  modified_base 23: mod_base = OTHER; note = 2'-O-methylguanosine
ttcaagttacaaaagcaaaacag

SEQ ID NO: 888 - RNA, 23 nt, synthetic construct
  source 1..23: mol_type = other RNA
  modified_base 1: mod_base = OTHER; note 5'-(E)-vinylphosphonate-2'-O-methyluridine-3'-phosphorothio ate
  modified_base 2: mod_base = OTHER; note = 2'-fluorouridine-3'-phosphorothioate
  modified_base 3: mod_base = OTHER; note = 2'-O-methylcytidine-3'-phosphate
  modified_base 4: mod_base = OTHER; note = 2'-O-methyladenosine-3'-phosphate
  modified_base 5: mod_base = OTHER; note = 2'-O-methyladenosine-3'-phosphate
  modified_base 6: mod_base = OTHER; note = Guanine threose nucleic acid-2'-phosphate
  modified_base 7: mod_base = OTHER; note = 2'-O-methyluridine-3'-phosphate
  modified_base 8: mod_base = OTHER; note = 2'-O-methyluridine-3'-phosphate
  modified_base 9: mod_base = OTHER; note = 2'-O-methyladenosine-3'-phosphate
  modified_base 10: mod_base = OTHER; note = 2'-O-methylcytidine-3'-phosphate
  modified_base 11: mod_base = OTHER; note = 2'-O-methyladenosine-3'-phosphate
  modified_base 12: mod_base = OTHER; note = 2'-O-methyladenosine-3'-phosphate
  modified_base 13: mod_base = OTHER; note = 2'-O-methyladenosine-3'-phosphate
  modified_base 14: mod_base = OTHER; note = 2'-fluoroadenosine-3'-phosphate
  modified_base 15: mod_base = OTHER; note = 2'-O-methylguanosine-3'-phosphate
  modified_base 16: mod_base = OTHER; note = 2'-fluorocytidine-3'-phosphate
  modified_base 17: mod_base = OTHER; note = 2'-O-methyladenosine-3'-phosphate
  modified_base 18: mod_base = OTHER; note = 2'-O-methyladenosine-3'-phosphate
  modified_base 19: mod_base = OTHER; note = 2'-O-methyladenosine-3'-phosphate
  modified_base 20: mod_base = OTHER; note = 2'-O-methyladenosine-3'-phosphate
  modified_base 21: mod_base = OTHER; note = 2'-O-methylcytidine-3'-phosphorothioate
  modified_base 22: mod_base = OTHER; note = 2'-O-methyladenosine-3'-phosphorothioate
  modified_base 23: mod_base = OTHER; note = 2'-O-methylguanosine
ttcaagttacaaaagcaaaacag

SEQ ID NO: 889 - RNA, 23 nt, synthetic construct
  source 1..23: mol_type = other RNA
  modified_base 1: mod_base = OTHER; note 5'-(E)-vinylphosphonate-2'-O-methyluridine-3'-phosphorothio ate
  modified_base 2: mod_base = OTHER; note = 2'-fluorouridine-3'-phosphorothioate
  modified_base 3: mod_base = OTHER; note = 2'-O-methylcytidine-3'-phosphate
  modified_base 4: mod_base = OTHER; note = 2'-O-methyladenosine-3'-phosphate
  modified_base 5: mod_base = OTHER; note = 2'-O-methyladenosine-3'-phosphate
  modified_base 6: mod_base = OTHER; note = 2'-fluoroguanosine-3'-phosphate
  modified_base 7: mod_base = OTHER; note = Uracil threose nucleic acid-2'-phosphate
  modified_base 8: mod_base = OTHER; note = 2'-O-methyluridine-3'-phosphate
  modified_base 9: mod_base = OTHER; note = 2'-O-methyladenosine-3'-phosphate
  modified_base 10: mod_base = OTHER; note = 2'-O-methylcytidine-3'-phosphate
  modified_base 11: mod_base = OTHER; note = 2'-O-methyladenosine-3'-phosphate
  modified_base 12: mod_base = OTHER; note = 2'-O-methyladenosine-3'-phosphate
  modified_base 13: mod_base = OTHER; note = 2'-O-methyladenosine-3'-phosphate
  modified_base 14: mod_base = OTHER; note = 2'-fluoroadenosine-3'-phosphate
  modified_base 15: mod_base = OTHER; note = 2'-O-methylguanosine-3'-phosphate
  modified_base 16: mod_base = OTHER; note = 2'-fluorocytidine-3'-phosphate
  modified_base 17: mod_base = OTHER; note = 2'-O-methyladenosine-3'-phosphate
  modified_base 18: mod_base = OTHER; note = 2'-O-methyladenosine-3'-phosphate
  modified_base 19: mod_base = OTHER; note = 2'-O-methyladenosine-3'-phosphate
  modified_base 20: mod_base = OTHER; note = 2'-O-methyladenosine-3'-phosphate
  modified_base 21: mod_base = OTHER; note = 2'-O-methylcytidine-3'-phosphorothioate
  modified_base 22: mod_base = OTHER; note = 2'-O-methyladenosine-3'-phosphorothioate
  modified_base 23: mod_base = OTHER; note = 2'-O-methylguanosine
ttcaagttacaaaagcaaaacag

SEQ ID NO: 890 - DNA, 23 bp, synthetic construct
  source 1..23: mol_type = other DNA
  modified_base 1: mod_base = OTHER; note 5'-(E)-vinylphosphonate-2'-O-methyluridine-3'-phosphorothio ate
  modified_base 2: mod_base = OTHER; note = 2'-fluorouridine-3'-phosphorothioate
  modified_base 3: mod_base = OTHER; note = 2'-O-methylcytidine-3'-phosphate
  modified_base 4: mod_base = OTHER; note = 2'-O-methyladenosine-3'-phosphate
  modified_base 6: mod_base = OTHER; note = 2'-fluoroguanosine-3'-phosphate
  modified_base 7: mod_base = OTHER; note = 2'-O-methyluridine-3'-phosphate
  modified_base 8: mod_base = OTHER; note = 2'-O-methyluridine-3'-phosphate
  modified_base 9: mod_base = OTHER; note = 2'-O-methyladenosine-3'-phosphate
  modified_base 10: mod_base = OTHER; note = 2'-O-methylcytidine-3'-phosphate
  modified_base 11: mod_base = OTHER; note = 2'-O-methyladenosine-3'-phosphate
  modified_base 12: mod_base = OTHER; note = 2'-O-methyladenosine-3'-phosphate
  modified_base 13: mod_base = OTHER; note = 2'-O-methyladenosine-3'-phosphate
  modified_base 14: mod_base = OTHER; note = 2'-fluoroadenosine-3'-phosphate
  modified_base 15: mod_base = OTHER; note = 2'-O-methylguanosine-3'-phosphate
  modified_base 16: mod_base = OTHER; note = 2'-fluorocytidine-3'-phosphate
  modified_base 17: mod_base = OTHER; note = 2'-O-methyladenosine-3'-phosphate
  modified_base 18: mod_base = OTHER; note = 2'-O-methyladenosine-3'-phosphate
  modified_base 19: mod_base = OTHER; note = 2'-O-methyladenosine-3'-phosphate
  modified_base 20: mod_base = OTHER; note = 2'-O-methyladenosine-3'-phosphate
  modified_base 21: mod_base = OTHER; note = 2'-O-methylcytidine-3'-phosphorothioate
  modified_base 22: mod_base = OTHER; note = 2'-O-methyladenosine-3'-phosphorothioate
  modified_base 23: mod_base = OTHER; note = 2'-O-methylguanosine
  misc_feature 1..4: note = RNA
  misc_feature 5: note = DNA
  misc_feature 6..23: note = RNA
ttcaagttacaaaagcaaaacag

SEQ ID NO: 891 - DNA, 23 bp, synthetic construct
  source 1..23: mol_type = other DNA
  modified_base 1: mod_base = OTHER; note 5'-(E)-vinylphosphonate-2'-O-methyluridine-3'-phosphorothio ate
  modified_base 2: mod_base = OTHER; note = 2'-fluorouridine-3'-phosphorothioate
  modified_base 3: mod_base = OTHER; note = 2'-O-methylcytidine-3'-phosphate
  modified_base 4: mod_base = OTHER; note = 2'-O-methyladenosine-3'-phosphate
  modified_base 5: mod_base = OTHER; note = 2'-O-methyladenosine-3'-phosphate
  modified_base 7: mod_base = OTHER; note = 2'-O-methyluridine-3'-phosphate
  modified_base 8: mod_base = OTHER; note = 2'-O-methyluridine-3'-phosphate
  modified_base 9: mod_base = OTHER; note = 2'-O-methyladenosine-3'-phosphate
  modified_base 10: mod_base = OTHER; note = 2'-O-methylcytidine-3'-phosphate
  modified_base 11: mod_base = OTHER; note = 2'-O-methyladenosine-3'-phosphate
  modified_base 12: mod_base = OTHER; note = 2'-O-methyladenosine-3'-phosphate
  modified_base 13: mod_base = OTHER; note = 2'-O-methyladenosine-3'-phosphate
  modified_base 14: mod_base = OTHER; note = 2'-fluoroadenosine-3'-phosphate
  modified_base 15: mod_base = OTHER; note = 2'-O-methylguanosine-3'-phosphate
  modified_base 16: mod_base = OTHER; note = 2'-fluorocytidine-3'-phosphate
  modified_base 17: mod_base = OTHER; note = 2'-O-methyladenosine-3'-phosphate
  modified_base 18: mod_base = OTHER; note = 2'-O-methyladenosine-3'-phosphate
  modified_base 19: mod_base = OTHER; note = 2'-O-methyladenosine-3'-phosphate
  modified_base 20: mod_base = OTHER; note = 2'-O-methyladenosine-3'-phosphate
  modified_base 21: mod_base = OTHER; note = 2'-O-methylcytidine-3'-phosphorothioate
  modified_base 22: mod_base = OTHER; note = 2'-O-methyladenosine-3'-phosphorothioate
  modified_base 23: mod_base = OTHER; note = 2'-O-methylguanosine
  misc_feature 1..5: note = RNA
  misc_feature 6: note = DNA
  misc_feature 7..23: note = RNA
ttcaagttacaaaagcaaaacag

SEQ ID NO: 892 - DNA, 23 bp, synthetic construct
  source 1..23: mol_type = other DNA
  modified_base 1: mod_base = OTHER; note 5'-(E)-vinylphosphonate-2'-O-methyluridine-3'-phosphorothio ate
  modified_base 2: mod_base = OTHER; note = 2'-fluorouridine-3'-phosphorothioate
  modified_base 3: mod_base = OTHER; note = 2'-O-methylcytidine-3'-phosphate
  modified_base 4: mod_base = OTHER; note = 2'-O-methyladenosine-3'-phosphate
  modified_base 5: mod_base = OTHER; note = 2'-O-methyladenosine-3'-phosphate
  modified_base 6: mod_base = OTHER; note = 2'-fluoroguanosine-3'-phosphate
  modified_base 8: mod_base = OTHER; note = 2'-O-methyluridine-3'-phosphate
  modified_base 9: mod_base = OTHER; note = 2'-O-methyladenosine-3'-phosphate
  modified_base 10: mod_base = OTHER; note = 2'-O-methylcytidine-3'-phosphate
  modified_base 11: mod_base = OTHER; note = 2'-O-methyladenosine-3'-phosphate
  modified_base 12: mod_base = OTHER; note = 2'-O-methyladenosine-3'-phosphate
  modified_base 13: mod_base = OTHER; note = 2'-O-methyladenosine-3'-phosphate
  modified_base 14: mod_base = OTHER; note = 2'-fluoroadenosine-3'-phosphate
  modified_base 15: mod_base = OTHER; note = 2'-O-methylguanosine-3'-phosphate
  modified_base 16: mod_base = OTHER; note = 2'-fluorocytidine-3'-phosphate
  modified_base 17: mod_base = OTHER; note = 2'-O-methyladenosine-3'-phosphate
  modified_base 18: mod_base = OTHER; note = 2'-O-methyladenosine-3'-phosphate
  modified_base 19: mod_base = OTHER; note = 2'-O-methyladenosine-3'-phosphate
  modified_base 20: mod_base = OTHER; note = 2'-O-methyladenosine-3'-phosphate
  modified_base 21: mod_base = OTHER; note = 2'-O-methylcytidine-3'-phosphorothioate
  modified_base 22: mod_base = OTHER; note = 2'-O-methyladenosine-3'-phosphorothioate
  modified_base 23: mod_base = OTHER; note = 2'-O-methylguanosine
  misc_feature 1..6: note = RNA
  misc_feature 7: note = DNA
  misc_feature 8..23: note = RNA
ttcaagttacaaaagcaaaacag

SEQ ID NO: 893 - RNA, 23 nt, synthetic construct
  source 1..23: mol_type = other RNA
  modified_base 1: mod_base = OTHER; note 5'-(E)-vinylphosphonate-2'-O-methyluridine-3'-phosphorothio ate
  modified_base 2: mod_base = OTHER; note = 2'-fluorouridine-3'-phosphorothioate
  modified_base 3: mod_base = OTHER; note = 2'-O-methyluridine-3'-phosphate
  modified_base 4: mod_base = OTHER; note = 2'-O-methyladenosine-3'-phosphate
  modified_base 5: mod_base = OTHER; note = 2'-O-methyladenosine-3'-phosphate
  modified_base 6: mod_base = OTHER; note = 2'-fluoroguanosine-3'-phosphate
  modified_base 7: mod_base = OTHER; note = 2'-O-methyluridine-3'-phosphate
  modified_base 8: mod_base = OTHER; note = 2'-O-methyluridine-3'-phosphate
  modified_base 9: mod_base = OTHER; note = 2'-O-methyladenosine-3'-phosphate
  modified_base 10: mod_base = OTHER; note = 2'-O-methylcytidine-3'-phosphate
  modified_base 11: mod_base = OTHER; note = 2'-O-methyladenosine-3'-phosphate
  modified_base 12: mod_base = OTHER; note = 2'-O-methyladenosine-3'-phosphate
  modified_base 13: mod_base = OTHER; note = 2'-O-methyladenosine-3'-phosphate
  modified_base 14: mod_base = OTHER; note = 2'-fluoroadenosine-3'-phosphate
  modified_base 15: mod_base = OTHER; note = 2'-O-methylguanosine-3'-phosphate
  modified_base 16: mod_base = OTHER; note = 2'-fluorocytidine-3'-phosphate
  modified_base 17: mod_base = OTHER; note = 2'-O-methyladenosine-3'-phosphate
  modified_base 18: mod_base = OTHER; note = 2'-O-methyladenosine-3'-phosphate
  modified_base 19: mod_base = OTHER; note = 2'-O-methyladenosine-3'-phosphate
  modified_base 20: mod_base = OTHER; note = 2'-O-methyladenosine-3'-phosphate
  modified_base 21: mod_base = OTHER; note = 2'-O-methylcytidine-3'-phosphorothioate
  modified_base 22: mod_base = OTHER; note = 2'-O-methyladenosine-3'-phosphorothioate
  modified_base 23: mod_base = OTHER; note = 2'-O-methylguanosine
tttaagttacaaaagcaaaacag

SEQ ID NO: 894 - RNA, 23 nt, synthetic construct
  source 1..23: mol_type = other RNA
  modified_base 1: mod_base = OTHER; note 5'-(E)-vinylphosphonate-2'-O-methyluridine-3'-phosphorothio ate
  modified_base 2: mod_base = OTHER; note = 2'-fluorouridine-3'-phosphorothioate
  modified_base 3: mod_base = OTHER; note = 2'-O-methyluridine-3'-phosphate
  modified_base 4: mod_base = OTHER; note = 2'-O-methyladenosine-3'-phosphate
  modified_base 5: mod_base = OTHER; note = 2'-O-methyladenosine-3'-phosphate
  modified_base 6: mod_base = OTHER; note = 2'-fluoroguanosine-3'-phosphate
  modified_base 7: mod_base = OTHER; note = 2'-O-methyluridine-3'-phosphate
  modified_base 8: mod_base = OTHER; note = 2'-O-methyluridine-3'-phosphate
  modified_base 9: mod_base = OTHER; note = 2'-O-methyladenosine-3'-phosphate
  modified_base 10: mod_base = OTHER; note = 2'-O-methylcytidine-3'-phosphate
  modified_base 11: mod_base = OTHER; note = 2'-O-methyladenosine-3'-phosphate
  modified_base 12: mod_base = OTHER; note = 2'-O-methyladenosine-3'-phosphate
  modified_base 13: mod_base = OTHER; note = 2'-O-methyladenosine-3'-phosphate
  modified_base 14: mod_base = OTHER; note = 2'-fluoroadenosine-3'-phosphate
  modified_base 15: mod_base = OTHER; note = 2'-O-methylguanosine-3'-phosphate
  modified_base 16: mod_base = OTHER; note = 2'-fluorocytidine-3'-phosphate
  modified_base 17: mod_base = OTHER; note = 2'-O-methyladenosine-3'-phosphate
  modified_base 18: mod_base = OTHER; note = 2'-O-methyladenosine-3'-phosphate
  modified_base 19: mod_base = OTHER; note = 2'-O-methyladenosine-3'-phosphate
  modified_base 20: mod_base = OTHER; note = 2'-O-methyladenosine-3'-phosphate
  modified_base 21: mod_base = OTHER; note = 2'-O-methylcytidine-3'-phosphorothioate
  modified_base 22: mod_base = OTHER; note = 2'-O-methyladenosine-3'-phosphorothioate
  modified_base 23: mod_base = OTHER; note = 2'-O-methylguanosine
tttaagttacaaaagcaaaacag

SEQ ID NO: 895 - RNA, 23 nt, synthetic construct
  source 1..23: mol_type = other RNA
  modified_base 1: mod_base = OTHER; note 5'-(E)-vinylphosphonate-2'-O-methyluridine-3'-phosphorothio ate
  modified_base 2: mod_base = OTHER; note = 2'-fluorouridine-3'-phosphorothioate
  modified_base 3: mod_base = OTHER; note = Cytosine threose nucleic acid-2'-phosphate
  modified_base 4: mod_base = OTHER; note = 2'-O-methyladenosine-3'-phosphate
  modified_base 5: mod_base = OTHER; note = Adenine threose nucleic acid-2'-phosphate
  modified_base 6: mod_base = OTHER; note = 2'-fluoroguanosine-3'-phosphate
  modified_base 7: mod_base = OTHER; note = 2'-O-methyluridine-3'-phosphate
  modified_base 8: mod_base = OTHER; note = 2'-O-methyluridine-3'-phosphate
  modified_base 9: mod_base = OTHER; note = 2'-O-methyladenosine-3'-phosphate
  modified_base 10: mod_base = OTHER; note = 2'-O-methylcytidine-3'-phosphate
  modified_base 11: mod_base = OTHER; note = 2'-O-methyladenosine-3'-phosphate
  modified_base 12: mod_base = OTHER; note = 2'-O-methyladenosine-3'-phosphate
  modified_base 13: mod_base = OTHER; note = 2'-O-methyladenosine-3'-phosphate
  modified_base 14: mod_base = OTHER; note = 2'-fluoroadenosine-3'-phosphate
  modified_base 15: mod_base = OTHER; note = 2'-O-methylguanosine-3'-phosphate
  modified_base 16: mod_base = OTHER; note = 2'-fluorocytidine-3'-phosphate
  modified_base 17: mod_base = OTHER; note = 2'-O-methyladenosine-3'-phosphate
  modified_base 18: mod_base = OTHER; note = 2'-O-methyladenosine-3'-phosphate
  modified_base 19: mod_base = OTHER; note = 2'-O-methyladenosine-3'-phosphate
  modified_base 20: mod_base = OTHER; note = 2'-O-methyladenosine-3'-phosphate
  modified_base 21: mod_base = OTHER; note = 2'-O-methylcytidine-3'-phosphorothioate
  modified_base 22: mod_base = OTHER; note = 2'-O-methyladenosine-3'-phosphorothioate
  modified_base 23: mod_base = OTHER; note = 2'-O-methylguanosine
ttcaagttacaaaagcaaaacag

SEQ ID NO: 896 - RNA, 23 nt, synthetic construct
  source 1..23: mol_type = other RNA
  modified_base 1: mod_base = OTHER; note 5'-(E)-vinylphosphonate-2'-O-methyluridine-3'-phosphorothio ate
  modified_base 2: mod_base = OTHER; note = 2'-fluorouridine-3'-phosphorothioate
  modified_base 3: mod_base = OTHER; note = Cytosine threose nucleic acid-2'-phosphate
  modified_base 4: mod_base = OTHER; note = 2'-O-methyladenosine-3'-phosphate
  modified_base 5: mod_base = OTHER; note = 2'-O-methyladenosine-3'-phosphate
  modified_base 6: mod_base = OTHER; note = Guanine threose nucleic acid-2'-phosphate
  modified_base 7: mod_base = OTHER; note = 2'-O-methyluridine-3'-phosphate
  modified_base 8: mod_base = OTHER; note = 2'-O-methyluridine-3'-phosphate
  modified_base 9: mod_base = OTHER; note = 2'-O-methyladenosine-3'-phosphate
  modified_base 10: mod_base = OTHER; note = 2'-O-methylcytidine-3'-phosphate
  modified_base 11: mod_base = OTHER; note = 2'-O-methyladenosine-3'-phosphate
  modified_base 12: mod_base = OTHER; note = 2'-O-methyladenosine-3'-phosphate
  modified_base 13: mod_base = OTHER; note = 2'-O-methyladenosine-3'-phosphate
  modified_base 14: mod_base = OTHER; note = 2'-fluoroadenosine-3'-phosphate
  modified_base 15: mod_base = OTHER; note = 2'-O-methylguanosine-3'-phosphate
  modified_base 16: mod_base = OTHER; note = 2'-fluorocytidine-3'-phosphate
  modified_base 17: mod_base = OTHER; note = 2'-O-methyladenosine-3'-phosphate
  modified_base 18: mod_base = OTHER; note = 2'-O-methyladenosine-3'-phosphate
  modified_base 19: mod_base = OTHER; note = 2'-O-methyladenosine-3'-phosphate
  modified_base 20: mod_base = OTHER; note = 2'-O-methyladenosine-3'-phosphate
  modified_base 21: mod_base = OTHER; note = 2'-O-methylcytidine-3'-phosphorothioate
  modified_base 22: mod_base = OTHER; note = 2'-O-methyladenosine-3'-phosphorothioate
  modified_base 23: mod_base = OTHER; note = 2'-O-methylguanosine
ttcaagttacaaaagcaaaacag

SEQ ID NO: 897 - RNA, 23 nt, synthetic construct
  source 1..23: mol_type = other RNA
  modified_base 1: mod_base = OTHER; note 5'-(E)-vinylphosphonate-2'-O-methyluridine-3'-phosphorothio ate
  modified_base 2: mod_base = OTHER; note = 2'-fluorouridine-3'-phosphorothioate
  modified_base 3: mod_base = OTHER; note = Cytosine threose nucleic acid-2'-phosphate
  modified_base 4: mod_base = OTHER; note = 2'-O-methyladenosine-3'-phosphate
  modified_base 5: mod_base = OTHER; note = 2'-O-methyladenosine-3'-phosphate
  modified_base 6: mod_base = OTHER; note = 2'-fluoroguanosine-3'-phosphate
  modified_base 7: mod_base = OTHER; note = Uracil threose nucleic acid-2'-phosphate
  modified_base 8: mod_base = OTHER; note = 2'-O-methyluridine-3'-phosphate
  modified_base 9: mod_base = OTHER; note = 2'-O-methyladenosine-3'-phosphate
  modified_base 10: mod_base = OTHER; note = 2'-O-methylcytidine-3'-phosphate
  modified_base 11: mod_base = OTHER; note = 2'-O-methyladenosine-3'-phosphate
  modified_base 12: mod_base = OTHER; note = 2'-O-methyladenosine-3'-phosphate
  modified_base 13: mod_base = OTHER; note = 2'-O-methyladenosine-3'-phosphate
  modified_base 14: mod_base = OTHER; note = 2'-fluoroadenosine-3'-phosphate
  modified_base 15: mod_base = OTHER; note = 2'-O-methylguanosine-3'-phosphate
  modified_base 16: mod_base = OTHER; note = 2'-fluorocytidine-3'-phosphate
  modified_base 17: mod_base = OTHER; note = 2'-O-methyladenosine-3'-phosphate
  modified_base 18: mod_base = OTHER; note = 2'-O-methyladenosine-3'-phosphate
  modified_base 19: mod_base = OTHER; note = 2'-O-methyladenosine-3'-phosphate
  modified_base 20: mod_base = OTHER; note = 2'-O-methyladenosine-3'-phosphate
  modified_base 21: mod_base = OTHER; note = 2'-O-methylcytidine-3'-phosphorothioate
  modified_base 22: mod_base = OTHER; note = 2'-O-methyladenosine-3'-phosphorothioate
  modified_base 23: mod_base = OTHER; note = 2'-O-methylguanosine
ttcaagttacaaaagcaaaacag

SEQ ID NO: 898 - DNA, 23 bp, synthetic construct
  source 1..23: mol_type = other DNA
  modified_base 1: mod_base = OTHER; note 5'-(E)-vinylphosphonate-2'-O-methyluridine-3'-phosphorothio ate
  modified_base 2: mod_base = OTHER; note = 2'-fluorouridine-3'-phosphorothioate
  modified_base 3: mod_base = OTHER; note = 2'-O-methylcytidine-3'-phosphate
  modified_base 4: mod_base = OTHER; note = 2'-O-methyladenosine-3'-phosphate
  modified_base 6: mod_base = OTHER; note = 2'-fluoroguanosine-3'-phosphate
  modified_base 8: mod_base = OTHER; note = 2'-O-methyluridine-3'-phosphate
  modified_base 9: mod_base = OTHER; note = 2'-O-methyladenosine-3'-phosphate
  modified_base 10: mod_base = OTHER; note = 2'-O-methylcytidine-3'-phosphate
  modified_base 11: mod_base = OTHER; note = 2'-O-methyladenosine-3'-phosphate
  modified_base 12: mod_base = OTHER; note = 2'-O-methyladenosine-3'-phosphate
  modified_base 13: mod_base = OTHER; note = 2'-O-methyladenosine-3'-phosphate
  modified_base 14: mod_base = OTHER; note = 2'-fluoroadenosine-3'-phosphate
  modified_base 15: mod_base = OTHER; note = 2'-O-methylguanosine-3'-phosphate
  modified_base 16: mod_base = OTHER; note = 2'-fluorocytidine-3'-phosphate
  modified_base 17: mod_base = OTHER; note = 2'-O-methyladenosine-3'-phosphate
  modified_base 18: mod_base = OTHER; note = 2'-O-methyladenosine-3'-phosphate
  modified_base 19: mod_base = OTHER; note = 2'-O-methyladenosine-3'-phosphate
  modified_base 20: mod_base = OTHER; note = 2'-O-methyladenosine-3'-phosphate
  modified_base 21: mod_base = OTHER; note = 2'-O-methylcytidine-3'-phosphorothioate
  modified_base 22: mod_base = OTHER; note = 2'-O-methyladenosine-3'-phosphorothioate
  modified_base 23: mod_base = OTHER; note = 2'-O-methylguanosine
  misc_feature 1..4: note = RNA
  misc_feature 5: note = DNA
  misc_feature 6: note = RNA
  misc_feature 7: note = DNA
  misc_feature 8..23: note = RNA
ttcaagttacaaaagcaaaacag

SEQ ID NO: 899 - DNA, 21 bp, synthetic construct
  source 1..21: mol_type = other DNA
  modified_base 1: mod_base = OTHER; note = 2'-O-methylcytidine-3'-phosphorothioate
  modified_base 2: mod_base = OTHER; note = 2'-O-methyluridine-3'-phosphorothioate
  modified_base 3: mod_base = OTHER; note = 2'-O-methyladenosine-3'-phosphate
  modified_base 4: mod_base = OTHER; note = 2'-O-methylguanosine-3'-phosphate
  modified_base 5: mod_base = OTHER; note = 2'-O-methyladenosine-3'-phosphate
  modified_base 6: mod_base = OTHER; note = 2'-O-methylcytidine-3'-phosphate
  modified_base 7: mod_base = OTHER; note = 2'-fluorocytidine-3'-phosphate
  modified_base 8: mod_base = OTHER; note = 2'-O-methyluridine-3'-phosphate
  modified_base 9: mod_base = OTHER; note = 2'-fluoroguanosine-3'-phosphate
  modified_base 10: mod_base = OTHER; note = 2'-O-methyluridine-3'-phosphate
  modified_base 12: mod_base = OTHER; note = 2'-O-methyluridine-3'-phosphate
  modified_base 13: mod_base = OTHER; note = 2'-O-methyluridine-3'-phosphate
  modified_base 14: mod_base = OTHER; note = 2'-O-methylguanosine-3'-phosphate
  modified_base 15: mod_base = OTHER; note = 2'-O-methylcytidine-3'-phosphate
  modified_base 16: mod_base = OTHER; note = 2'-O-methyluridine-3'-phosphate
  modified_base 17: mod_base = OTHER; note = 2'-O-methyluridine-3'-phosphate
  modified_base 18: mod_base = OTHER; note = 2'-O-methyluridine-3'-phosphate
  modified_base 19: mod_base = OTHER; note = 2'-O-methyluridine-3'-phosphate
  modified_base 20: mod_base = OTHER; note = 2'-O-methylguanosine-3'-phosphate
  modified_base 21: mod_base = OTHER; note 2'-O-methyluridine-3'-phosphate-(N1-hydroxyethanol-N12[tris (N-acetylgalactosamine-triethyleneglycol)]-diamidodecane]
  misc_feature 1..10: note = RNA
  misc_feature 11: note = DNA
  misc_feature 12..21: note = RNA
ctagacctgttttgcttttgt

SEQ ID NO: 900 - DNA, 21 bp, synthetic construct
  source 1..21: mol_type = other DNA
  modified_base 1: mod_base = OTHER; note = 2'-O-methylcytidine-3'-phosphorothioate
  modified_base 2: mod_base = OTHER; note = 2'-O-methyluridine-3'-phosphorothioate
  modified_base 3: mod_base = OTHER; note = 2'-O-methyladenosine-3'-phosphate
  modified_base 4: mod_base = OTHER; note = 2'-O-methylguanosine-3'-phosphate
  modified_base 5: mod_base = OTHER; note = 2'-O-methyladenosine-3'-phosphate
  modified_base 6: mod_base = OTHER; note = 2'-O-methylcytidine-3'-phosphate
  modified_base 7: mod_base = OTHER; note = 2'-fluorocytidine-3'-phosphate
  modified_base 8: mod_base = OTHER; note = 2'-O-methyluridine-3'-phosphate
  modified_base 9: mod_base = OTHER; note = 2'-fluoroguanosine-3'-phosphate
  modified_base 10: mod_base = OTHER; note = 2'-fluorouridine-3'-phosphate
  modified_base 12: mod_base = OTHER; note = 2'-O-methyluridine-3'-phosphate
  modified_base 13: mod_base = OTHER; note = 2'-O-methyluridine-3'-phosphate
  modified_base 14: mod_base = OTHER; note = 2'-O-methylguanosine-3'-phosphate
  modified_base 15: mod_base = OTHER; note = 2'-O-methylcytidine-3'-phosphate
  modified_base 16: mod_base = OTHER; note = 2'-O-methyluridine-3'-phosphate
  modified_base 17: mod_base = OTHER; note = 2'-O-methyluridine-3'-phosphate
  modified_base 18: mod_base = OTHER; note = 2'-O-methyluridine-3'-phosphate
  modified_base 19: mod_base = OTHER; note = 2'-O-methyluridine-3'-phosphate
  modified_base 20: mod_base = OTHER; note = 2'-O-methylguanosine-3'-phosphate
  modified_base 21: mod_base = OTHER; note 2'-O-methyluridine-3'-phosphate-(N1-hydroxyethanol-N12[tris (N-acetylgalactosamine-triethyleneglycol)]-diamidodecane]
  misc_feature 1..10: note = RNA
  misc_feature 11: note = DNA
  misc_feature 12..21: note = RNA
ctagacctgttttgcttttgt

SEQ ID NO: 901 - DNA, 21 bp, synthetic construct
  source 1..21: mol_type = other DNA
  modified_base 1: mod_base = OTHER; note = 2'-O-methylcytidine-3'-phosphorothioate
  modified_base 2: mod_base = OTHER; note = 2'-O-methyluridine-3'-phosphorothioate
  modified_base 3: mod_base = OTHER; note = 2'-O-methyladenosine-3'-phosphate
  modified_base 4: mod_base = OTHER; note = 2'-O-methylguanosine-3'-phosphate
  modified_base 5: mod_base = OTHER; note = 2'-O-methyladenosine-3'-phosphate
  modified_base 6: mod_base = OTHER; note = 2'-O-methylcytidine-3'-phosphate
  modified_base 7: mod_base = OTHER; note = 2'-fluorocytidine-3'-phosphate
  modified_base 8: mod_base = OTHER; note = 2'-O-methyluridine-3'-phosphate
  modified_base 9: mod_base = OTHER; note = 2'-fluoroguanosine-3'-phosphate
  modified_base 10: mod_base = OTHER; note = 2'-fluorouridine-3'-phosphate
  modified_base 12: mod_base = OTHER; note = 2'-O-methyluridine-3'-phosphate
  modified_base 13: mod_base = OTHER; note = 2'-O-methyluridine-3'-phosphate
  modified_base 14: mod_base = OTHER; note = 2'-O-methylguanosine-3'-phosphate
  modified_base 15: mod_base = OTHER; note = 2'-O-methylcytidine-3'-phosphate
  modified_base 16: mod_base = OTHER; note = 2'-O-methyluridine-3'-phosphate
  modified_base 17: mod_base = OTHER; note = 2'-O-methyluridine-3'-phosphate
  modified_base 18: mod_base = OTHER; note = 2'-O-methyluridine-3'-phosphate
  modified_base 19: mod_base = OTHER; note = 2'-O-methyluridine-3'-phosphate
  modified_base 20: mod_base = OTHER; note = 2'-O-methylguanosine-3'-phosphate
  modified_base 21: mod_base = OTHER; note 2'-O-methyluridine-3'-phosphate-(N1-hydroxyethanol-N12[tris (N-acetylgalactosamine-triethyleneglycol)]-diamidodecane]
  misc_feature 1..10: note = RNA
  misc_feature 11: note = DNA
  misc_feature 12..21: note = RNA
ctagacctgttttgcttttgt

SEQ ID NO: 902 - DNA, 21 bp, synthetic construct
  source 1..21: mol_type = other DNA
  modified_base 1: mod_base = OTHER; note 2'-O-methoxyethyl(MOE)-5-methylcytidine-3'-phosphorothioate
  modified_base 2: mod_base = OTHER; note = 2'-O-methoxyethyl(MOE)-thymidine(or 5-methyluridine)-3'- phosphorothioate
  modified_base 3: mod_base = OTHER; note = 2'-O-methyladenosine-3'-phosphate
  modified_base 4: mod_base = OTHER; note = 2'-O-methylguanosine-3'-phosphate
  modified_base 5: mod_base = OTHER; note = 2'-O-methyladenosine-3'-phosphate
  modified_base 6: mod_base = OTHER; note = 2'-O-methylcytidine-3'-phosphate
  modified_base 7: mod_base = OTHER; note = 2'-fluorocytidine-3'-phosphate
  modified_base 8: mod_base = OTHER; note = 2'-O-methyluridine-3'-phosphate
  modified_base 9: mod_base = OTHER; note = 2'-fluoroguanosine-3'-phosphate
  modified_base 10: mod_base = OTHER; note = 2'-fluorouridine-3'-phosphate
  modified_base 12: mod_base = OTHER; note = 2'-O-methyluridine-3'-phosphate
  modified_base 13: mod_base = OTHER; note = 2'-O-methyluridine-3'-phosphate
  modified_base 14: mod_base = OTHER; note = 2'-O-methylguanosine-3'-phosphate
  modified_base 15: mod_base = OTHER; note = 2'-O-methylcytidine-3'-phosphate
  modified_base 16: mod_base = OTHER; note = 2'-O-methyluridine-3'-phosphate
  modified_base 17: mod_base = OTHER; note = 2'-O-methyluridine-3'-phosphate
  modified_base 18: mod_base = OTHER; note = 2'-O-methyluridine-3'-phosphate
  modified_base 19: mod_base = OTHER; note = 2'-O-methyluridine-3'-phosphate
  modified_base 20: mod_base = OTHER; note = 2'-O-methoxyethyl(MOE) guanosine-3'-phosphate
  modified_base 21: mod_base = OTHER; note = 2'-O-methoxyethyl(MOE)-thymidine(or 5-methyluridine)-3'-phosphate-(N1-hydroxyethanol-N12[tris(N -acetylgalactosamine-triethyleneglycol)]-diamidodecane]
  misc_feature 1..10: note = RNA
  misc_feature 11: note = DNA
  misc_feature 12..21: note = RNA
ctagacctgttttgcttttgt

SEQ ID NO: 903 - DNA, 21 bp, synthetic construct
  source 1..21: mol_type = other DNA
  modified_base 1: mod_base = OTHER; note 2'-O-methoxyethyl(MOE)-5-methylcytidine-3'-phosphorothioate
  modified_base 2: mod_base = OTHER; note = 2'-O-methoxyethyl(MOE)-thymidine(or 5-methyluridine)-3'- phosphorothioate
  modified_base 3: mod_base = OTHER; note = 2'-O-methyladenosine-3'-phosphate
  modified_base 4: mod_base = OTHER; note = 2'-O-methylguanosine-3'-phosphate
  modified_base 5: mod_base = OTHER; note = 2'-O-methyladenosine-3'-phosphate
  modified_base 6: mod_base = OTHER; note = 2'-O-methylcytidine-3'-phosphate
  modified_base 7: mod_base = OTHER; note = 2'-fluorocytidine-3'-phosphate
  modified_base 8: mod_base = OTHER; note = 2'-O-methyluridine-3'-phosphate
  modified_base 9: mod_base = OTHER; note = 2'-fluoroguanosine-3'-phosphate
  modified_base 10: mod_base = OTHER; note = 2'-fluorouridine-3'-phosphate
  modified_base 12: mod_base = OTHER; note = 2'-O-methyluridine-3'-phosphate
  modified_base 13: mod_base = OTHER; note = 2'-O-methyluridine-3'-phosphate
  modified_base 14: mod_base = OTHER; note = 2'-O-methylguanosine-3'-phosphate
  modified_base 15: mod_base = OTHER; note = 2'-O-methylcytidine-3'-phosphate
  modified_base 16: mod_base = OTHER; note = 2'-O-methyluridine-3'-phosphate
  modified_base 17: mod_base = OTHER; note = 2'-O-methyluridine-3'-phosphate
  modified_base 18: mod_base = OTHER; note = 2'-O-methyluridine-3'-phosphate
  modified_base 19: mod_base = OTHER; note = 2'-O-methyluridine-3'-phosphate
  modified_base 20: mod_base = OTHER; note = 2'-O-methoxyethyl(MOE) guanosine-3'-phosphate
  modified_base 21: mod_base = OTHER; note = 2'-O-methoxyethyl(MOE)-thymidine(or 5-methyluridine)-3'-phosphate-(N1-hydroxyethanol-N12[tris(N -acetylgalactosamine-triethyleneglycol)]-diamidodecane]
  misc_feature 1..10: note = RNA
  misc_feature 11: note = DNA
  misc_feature 12..21: note = RNA
ctagacctgttttgcttttgt

SEQ ID NO: 904 - DNA, 21 bp, synthetic construct
  source 1..21: mol_type = other DNA
  modified_base 1: mod_base = OTHER; note 2'-O-methoxyethyl(MOE)-5-methylcytidine-3'-phosphorothioate
  modified_base 2: mod_base = OTHER; note = 2'-O-methoxyethyl(MOE)-thymidine(or 5-methyluridine)-3'- phosphorothioate
  modified_base 3: mod_base = OTHER; note = 2'-O-methyladenosine-3'-phosphate
  modified_base 4: mod_base = OTHER; note = 2'-O-methylguanosine-3'-phosphate
  modified_base 5: mod_base = OTHER; note = 2'-O-methyladenosine-3'-phosphate
  modified_base 6: mod_base = OTHER; note = 2'-O-methylcytidine-3'-phosphate
  modified_base 7: mod_base = OTHER; note = 2'-fluorocytidine-3'-phosphate
  modified_base 8: mod_base = OTHER; note = 2'-O-methyluridine-3'-phosphate
  modified_base 9: mod_base = OTHER; note = 2'-fluoroguanosine-3'-phosphate
  modified_base 10: mod_base = OTHER; note = 2'-fluorouridine-3'-phosphate
  modified_base 12: mod_base = OTHER; note = 2'-O-methyluridine-3'-phosphate
  modified_base 13: mod_base = OTHER; note = 2'-O-methyluridine-3'-phosphate
  modified_base 14: mod_base = OTHER; note = 2'-O-methylguanosine-3'-phosphate
  modified_base 15: mod_base = OTHER; note = 2'-O-methylcytidine-3'-phosphate
  modified_base 16: mod_base = OTHER; note = 2'-O-methyluridine-3'-phosphate
  modified_base 17: mod_base = OTHER; note = 2'-O-methyluridine-3'-phosphate
  modified_base 18: mod_base = OTHER; note = 2'-O-methyluridine-3'-phosphate
  modified_base 19: mod_base = OTHER; note = 2'-O-methyluridine-3'-phosphate
  modified_base 20: mod_base = OTHER; note = 2'-O-methoxyethyl(MOE) guanosine-3'-phosphate
  modified_base 21: mod_base = OTHER; note = 2'-O-methoxyethyl(MOE) adenosine-3'-phosphate-(N1-hydroxyethanol-N12[tris(N-acetyl galactosamine-triethyleneglycol)]-diamidodecane]
  misc_feature 1..10: note = RNA
  misc_feature 11: note = DNA
  misc_feature 12..21: note = RNA
ctagacctgttttgcttttga

SEQ ID NO: 905 - DNA, 21 bp, synthetic construct
  source 1..21: mol_type = other DNA
  modified_base 1: mod_base = OTHER; note = 2'-O-methylcytidine-3'-phosphorothioate
  modified_base 2: mod_base = OTHER; note = 2'-O-methyluridine-3'-phosphorothioate
  modified_base 3: mod_base = OTHER; note = 2'-O-methyladenosine-3'-phosphate
  modified_base 4: mod_base = OTHER; note = 2'-O-methylguanosine-3'-phosphate
  modified_base 5: mod_base = OTHER; note = 2'-O-methyladenosine-3'-phosphate
  modified_base 6: mod_base = OTHER; note = 2'-O-methylcytidine-3'-phosphate
  modified_base 7: mod_base = OTHER; note = 2'-fluorocytidine-3'-phosphate
  modified_base 8: mod_base = OTHER; note = 2'-O-methyluridine-3'-phosphate
  modified_base 9: mod_base = OTHER; note = 2'-fluoroguanosine-3'-phosphate
  modified_base 10: mod_base = OTHER; note = 2'-O-methyluridine-3'-phosphate
  modified_base 12: mod_base = OTHER; note = 2'-O-methyluridine-3'-phosphate
  modified_base 13: mod_base = OTHER; note = 2'-O-methyluridine-3'-phosphate
  modified_base 14: mod_base = OTHER; note = 2'-O-methylguanosine-3'-phosphate
  modified_base 15: mod_base = OTHER; note = 2'-O-methylcytidine-3'-phosphate
  modified_base 16: mod_base = OTHER; note = 2'-O-methyluridine-3'-phosphate
  modified_base 17: mod_base = OTHER; note = 2'-O-methyluridine-3'-phosphate
  modified_base 18: mod_base = OTHER; note = 2'-O-methyluridine-3'-phosphate
  modified_base 19: mod_base = OTHER; note = 2'-O-methyluridine-3'-phosphate
  modified_base 20: mod_base = OTHER; note = 2'-O-methylguanosine-3'-phosphate
  modified_base 21: mod_base = OTHER; note 2'-O-methyluridine-3'-phosphate-N-[tris(N-acetylgalactosami ne-alkyl)-amidodecanoyl)]-4-hydroxyprolinol (Hyp-(N-acetylgalactosamine-alkyl)3)
  misc_feature 1..10: note = RNA
  misc_feature 11: note = DNA
  misc_feature 12..21: note = RNA
ctagacctgttttgcttttgt

SEQ ID NO: 906 - DNA, 21 bp, synthetic construct
  source 1..21: mol_type = other DNA
  modified_base 1: mod_base = OTHER; note 2'-O-methoxyethyl(MOE)-5-methylcytidine-3'-phosphorothioate
  modified_base 2: mod_base = OTHER; note = 2'-O-methoxyethyl(MOE)-thymidine(or 5-methyluridine)-3'- phosphorothioate
  modified_base 3: mod_base = OTHER; note = 2'-O-methyladenosine-3'-phosphate
  modified_base 4: mod_base = OTHER; note = 2'-O-methylguanosine-3'-phosphate
  modified_base 5: mod_base = OTHER; note = 2'-O-methyladenosine-3'-phosphate
  modified_base 6: mod_base = OTHER; note = 2'-O-methylcytidine-3'-phosphate
  modified_base 7: mod_base = OTHER; note = 2'-fluorocytidine-3'-phosphate
  modified_base 8: mod_base = OTHER; note = 2'-O-methyluridine-3'-phosphate
  modified_base 9: mod_base = OTHER; note = 2'-fluoroguanosine-3'-phosphate
  modified_base 10: mod_base = OTHER; note = 2'-fluorouridine-3'-phosphate
  modified_base 12: mod_base = OTHER; note = 2'-O-methyluridine-3'-phosphate
  modified_base 13: mod_base = OTHER; note = 2'-O-methyluridine-3'-phosphate
  modified_base 14: mod_base = OTHER; note = 2'-O-methylguanosine-3'-phosphate
  modified_base 15: mod_base = OTHER; note = 2'-O-methylcytidine-3'-phosphate
  modified_base 16: mod_base = OTHER; note = 2'-O-methyluridine-3'-phosphate
  modified_base 17: mod_base = OTHER; note = 2'-O-methyluridine-3'-phosphate
  modified_base 18: mod_base = OTHER; note = 2'-O-methyluridine-3'-phosphate
  modified_base 19: mod_base = OTHER; note = 2'-O-methyluridine-3'-phosphate
  modified_base 20: mod_base = OTHER; note = 2'-O-methoxyethyl(MOE) guanosine-3'-phosphate
  modified_base 21: mod_base = OTHER; note = 2'-O-methoxyethyl(MOE)-thymidine(or 5-methyluridine)-3'-phosphate-N-[tris(N-acetylgalactosamine -alkyl)-amidodecanoyl)]-4-hydroxyprolinol (Hyp-(N-acetylgalactosamine-alkyl)3)
  misc_feature 1..10: note = RNA
  misc_feature 11: note = DNA
  misc_feature 12..21: note = RNA
ctagacctgttttgcttttgt

SEQ ID NO: 907 - DNA, 21 bp, synthetic construct
  source 1..21: mol_type = other DNA
  modified_base 1: mod_base = OTHER; note 2'-O-methoxyethyl(MOE)-5-methylcytidine-3'-phosphorothioate
  modified_base 2: mod_base = OTHER; note = 2'-O-methoxyethyl(MOE)-thymidine(or 5-methyluridine)-3'- phosphorothioate
  modified_base 3: mod_base = OTHER; note = 2'-O-methyladenosine-3'-phosphate
  modified_base 4: mod_base = OTHER; note = 2'-O-methylguanosine-3'-phosphate
  modified_base 5: mod_base = OTHER; note = 2'-O-methyladenosine-3'-phosphate
  modified_base 6: mod_base = OTHER; note = 2'-O-methylcytidine-3'-phosphate
  modified_base 7: mod_base = OTHER; note = 2'-fluorocytidine-3'-phosphate
  modified_base 8: mod_base = OTHER; note = 2'-O-methyluridine-3'-phosphate
  modified_base 9: mod_base = OTHER; note = 2'-fluoroguanosine-3'-phosphate
  modified_base 10: mod_base = OTHER; note = 2'-fluorouridine-3'-phosphate
  modified_base 12: mod_base = OTHER; note = 2'-O-methyluridine-3'-phosphate
  modified_base 13: mod_base = OTHER; note = 2'-O-methyluridine-3'-phosphate
  modified_base 14: mod_base = OTHER; note = 2'-O-methylguanosine-3'-phosphate
  modified_base 15: mod_base = OTHER; note = 2'-O-methylcytidine-3'-phosphate
  modified_base 16: mod_base = OTHER; note = 2'-O-methyluridine-3'-phosphate
  modified_base 17: mod_base = OTHER; note = 2'-O-methyluridine-3'-phosphate
  modified_base 18: mod_base = OTHER; note = 2'-O-methyluridine-3'-phosphate
  modified_base 19: mod_base = OTHER; note = 2'-O-methyluridine-3'-phosphate
  modified_base 20: mod_base = OTHER; note = 2'-O-methoxyethyl(MOE) guanosine-3'-phosphate
  modified_base 21: mod_base = OTHER; note = 2'-O-methoxyethyl(MOE)-thymidine(or 5-methyluridine)-3'-phosphate-N-[tris(N-acetylgalactosamine -alkyl)-amidodecanoyl)]-4-hydroxyprolinol (Hyp-(N-acetylgalactosamine-alkyl)3)
  misc_feature 1..10: note = RNA
  misc_feature 11: note = DNA
  misc_feature 12..21: note = RNA
ctagacctgttttgcttttgt

SEQ ID NO: 908 - DNA, 21 bp, synthetic construct
  source 1..21: mol_type = other DNA
  modified_base 1: mod_base = OTHER; note = 2'-O-methylcytidine-3'-phosphorothioate
  modified_base 2: mod_base = OTHER; note = 2'-O-methyluridine-3'-phosphorothioate
  modified_base 3: mod_base = OTHER; note = 2'-O-methyladenosine-3'-phosphate
  modified_base 4: mod_base = OTHER; note = 2'-O-methylguanosine-3'-phosphate
  modified_base 5: mod_base = OTHER; note = 2'-O-methyladenosine-3'-phosphate
  modified_base 6: mod_base = OTHER; note = 2'-O-methylcytidine-3'-phosphate
  modified_base 7: mod_base = OTHER; note = 2'-fluorocytidine-3'-phosphate
  modified_base 8: mod_base = OTHER; note = 2'-O-methyluridine-3'-phosphate
  modified_base 9: mod_base = OTHER; note = 2'-fluoroguanosine-3'-phosphate
  modified_base 10: mod_base = OTHER; note = 2'-fluorouridine-3'-phosphate
  modified_base 12: mod_base = OTHER; note = 2'-O-methyluridine-3'-phosphate
  modified_base 13: mod_base = OTHER; note = 2'-O-methyluridine-3'-phosphate
  modified_base 14: mod_base = OTHER; note = 2'-O-methylguanosine-3'-phosphate
  modified_base 15: mod_base = OTHER; note = 2'-O-methylcytidine-3'-phosphate
  modified_base 16: mod_base = OTHER; note = 2'-O-methyluridine-3'-phosphate
  modified_base 17: mod_base = OTHER; note = 2'-O-methyluridine-3'-phosphate
  modified_base 18: mod_base = OTHER; note = 2'-O-methyluridine-3'-phosphate
  modified_base 19: mod_base = OTHER; note = 2'-O-methyluridine-3'-phosphate
  modified_base 20: mod_base = OTHER; note = 2'-O-methylguanosine-3'-phosphate
  modified_base 21: mod_base = OTHER; note 2'-O-methyluridine-3'-phosphate-N-[tris(N-acetylgalactosami ne-alkyl)-amidodecanoyl)]-4-hydroxyprolinol (Hyp-(N-acetylgalactosamine-alkyl)3)
  misc_feature 1..10: note = RNA
  misc_feature 11: note = DNA
  misc_feature 12..21: note = RNA
ctagacctgttttgcttttgt

SEQ ID NO: 909 - DNA, 21 bp, synthetic construct
  source 1..21: mol_type = other DNA
  modified_base 1: mod_base = OTHER; note 2'-O-methoxyethyl(MOE)-5-methylcytidine-3'-phosphorothioate
  modified_base 2: mod_base = OTHER; note = 2'-O-methoxyethyl(MOE)-thymidine(or 5-methyluridine)-3'- phosphorothioate
  modified_base 3: mod_base = OTHER; note = 2'-O-methyladenosine-3'-phosphate
  modified_base 4: mod_base = OTHER; note = 2'-O-methylguanosine-3'-phosphate
  modified_base 5: mod_base = OTHER; note = 2'-O-methyladenosine-3'-phosphate
  modified_base 6: mod_base = OTHER; note = 2'-O-methylcytidine-3'-phosphate
  modified_base 7: mod_base = OTHER; note = 2'-fluorocytidine-3'-phosphate
  modified_base 8: mod_base = OTHER; note = 2'-O-methyluridine-3'-phosphate
  modified_base 9: mod_base = OTHER; note = 2'-fluoroguanosine-3'-phosphate
  modified_base 10: mod_base = OTHER; note = 2'-fluorouridine-3'-phosphate
  modified_base 12: mod_base = OTHER; note = 2'-O-methyluridine-3'-phosphate
  modified_base 13: mod_base = OTHER; note = 2'-O-methyluridine-3'-phosphate
  modified_base 14: mod_base = OTHER; note = 2'-O-methylguanosine-3'-phosphate
  modified_base 15: mod_base = OTHER; note = 2'-O-methylcytidine-3'-phosphate
  modified_base 16: mod_base = OTHER; note = 2'-O-methyluridine-3'-phosphate
  modified_base 17: mod_base = OTHER; note = 2'-O-methyluridine-3'-phosphate
  modified_base 18: mod_base = OTHER; note = 2'-O-methyluridine-3'-phosphate
  modified_base 19: mod_base = OTHER; note = 2'-O-methyluridine-3'-phosphate
  modified_base 20: mod_base = OTHER; note = 2'-O-methoxyethyl(MOE) guanosine-3'-phosphate
  modified_base 21: mod_base = OTHER; note = 2'-O-methoxyethyl(MOE) adenosine-3'-phosphate-(N1-hydroxyethanol-N12[tris(N-acetyl galactosamine-triethyleneglycol)]-diamidodecane]
  misc_feature 1..10: note = RNA
  misc_feature 11: note = DNA
  misc_feature 12..21: note = RNA
ctagacctgttttgcttttga

SEQ ID NO: 910 - DNA, 21 bp, synthetic construct
  source 1..21: mol_type = other DNA
  modified_base 1: mod_base = OTHER; note 2'-O-methoxyethyl(MOE)-5-methylcytidine-3'-phosphorothioate
  modified_base 2: mod_base = OTHER; note = 2'-O-methoxyethyl(MOE)-thymidine(or 5-methyluridine)-3'- phosphorothioate
  modified_base 3: mod_base = OTHER; note = 2'-O-methyladenosine-3'-phosphate
  modified_base 4: mod_base = OTHER; note = 2'-O-methylguanosine-3'-phosphate
  modified_base 5: mod_base = OTHER; note = 2'-O-methyladenosine-3'-phosphate
  modified_base 6: mod_base = OTHER; note = 2'-O-methylcytidine-3'-phosphate
  modified_base 7: mod_base = OTHER; note = 2'-fluorocytidine-3'-phosphate
  modified_base 8: mod_base = OTHER; note = 2'-O-methyluridine-3'-phosphate
  modified_base 9: mod_base = OTHER; note = 2'-fluoroguanosine-3'-phosphate
  modified_base 10: mod_base = OTHER; note = 2'-fluorouridine-3'-phosphate
  modified_base 12: mod_base = OTHER; note = 2'-O-methyluridine-3'-phosphate
  modified_base 13: mod_base = OTHER; note = 2'-O-methyluridine-3'-phosphate
  modified_base 14: mod_base = OTHER; note = 2'-O-methylguanosine-3'-phosphate
  modified_base 15: mod_base = OTHER; note = 2'-O-methylcytidine-3'-phosphate
  modified_base 16: mod_base = OTHER; note = 2'-O-methyluridine-3'-phosphate
  modified_base 17: mod_base = OTHER; note = 2'-O-methyluridine-3'-phosphate
  modified_base 18: mod_base = OTHER; note = 2'-O-methyluridine-3'-phosphate
  modified_base 19: mod_base = OTHER; note = 2'-O-methyluridine-3'-phosphorothioate
  modified_base 20: mod_base = OTHER; note = 2'-O-methoxyethyl(MOE) guanosine-3'-phosphorothioate
  modified_base 21: mod_base = OTHER; note = 2'-O-methoxyethyl(MOE) adenosine-3'-phosphate-(N1-hydroxyethanol-N12[tris(N-acetyl galactosamine-triethyleneglycol)]-diamidodecane]
  misc_feature 1..10: note = RNA
  misc_feature 11: note = DNA
  misc_feature 12..21: note = RNA
ctagacctgttttgcttttga

SEQ ID NO: 911 - RNA, 21 nt, synthetic construct
  source 1..21: mol_type = other RNA
  modified_base 1: mod_base = OTHER; note 2'-O-methoxyethyl(MOE)-5-methylcytidine-3'-phosphorothioate
  modified_base 2: mod_base = OTHER; note = 2'-O-methoxyethyl(MOE)-thymidine(or 5-methyluridine)-3'- phosphorothioate
  modified_base 3: mod_base = OTHER; note = 2'-O-methyladenosine-3'-phosphate
  modified_base 4: mod_base = OTHER; note = 2'-O-methylguanosine-3'-phosphate
  modified_base 5: mod_base = OTHER; note = 2'-O-methyladenosine-3'-phosphate
  modified_base 6: mod_base = OTHER; note = 2'-O-methylcytidine-3'-phosphate
  modified_base 7: mod_base = OTHER; note = 2'-fluorocytidine-3'-phosphate
  modified_base 8: mod_base = OTHER; note = 2'-O-methyluridine-3'-phosphate
  modified_base 9: mod_base = OTHER; note = 2'-fluoroguanosine-3'-phosphate
  modified_base 10: mod_base = OTHER; note = 2'-fluorouridine-3'-phosphate
  modified_base 11: mod_base = OTHER; note = 2'-fluorouridine-3'-phosphate
  modified_base 12: mod_base = OTHER; note = 2'-O-methyluridine-3'-phosphate
  modified_base 13: mod_base = OTHER; note = 2'-O-methyluridine-3'-phosphate
  modified_base 14: mod_base = OTHER; note = 2'-O-methylguanosine-3'-phosphate
  modified_base 15: mod_base = OTHER; note = 2'-O-methylcytidine-3'-phosphate
  modified_base 16: mod_base = OTHER; note = 2'-O-methyluridine-3'-phosphate
  modified_base 17: mod_base = OTHER; note = 2'-O-methyluridine-3'-phosphate
  modified_base 18: mod_base = OTHER; note = 2'-O-methyluridine-3'-phosphate
  modified_base 19: mod_base = OTHER; note = 2'-O-methyluridine-3'-phosphate
  modified_base 20: mod_base = OTHER; note = 2'-O-methoxyethyl(MOE) guanosine-3'-phosphate
  modified_base 21: mod_base = OTHER; note = 2'-O-methoxyethyl(MOE)-thymidine(or 5-methyluridine)-3'-phosphate-(N1-hydroxyethanol-N12[tris(N -acetylgalactosamine-triethyleneglycol)]-diamidodecane]
ctagacctgttttgcttttgt

SEQ ID NO: 912 - DNA, 21 bp, synthetic construct
  source 1..21: mol_type = other DNA
  modified_base 1: mod_base = OTHER; note 2'-O-methoxyethyl(MOE)-5-methylcytidine-3'-phosphorothioate
  modified_base 2: mod_base = OTHER; note = 2'-O-methoxyethyl(MOE)-thymidine(or 5-methyluridine)-3'- phosphorothioate
  modified_base 3: mod_base = OTHER; note = 2'-O-methyladenosine-3'-phosphate
  modified_base 4: mod_base = OTHER; note = 2'-O-methylguanosine-3'-phosphate
  modified_base 5: mod_base = OTHER; note = 2'-O-methyladenosine-3'-phosphate
  modified_base 6: mod_base = OTHER; note = 2'-O-methylcytidine-3'-phosphate
  modified_base 7: mod_base = OTHER; note = 2'-fluorocytidine-3'-phosphate
  modified_base 8: mod_base = OTHER; note = 2'-O-methyluridine-3'-phosphate
  modified_base 9: mod_base = OTHER; note = 2'-fluoroguanosine-3'-phosphate
  modified_base 10: mod_base = OTHER; note = 2'-fluorouridine-3'-phosphate
  modified_base 12: mod_base = OTHER; note = 2'-O-methyluridine-3'-phosphate
  modified_base 13: mod_base = OTHER; note = 2'-O-methyluridine-3'-phosphate
  modified_base 14: mod_base = OTHER; note = 2'-O-methylguanosine-3'-phosphate
  modified_base 15: mod_base = OTHER; note = 2'-O-methylcytidine-3'-phosphate
  modified_base 16: mod_base = OTHER; note = 2'-O-methyluridine-3'-phosphate
  modified_base 17: mod_base = OTHER; note = 2'-O-methyluridine-3'-phosphate
  modified_base 18: mod_base = OTHER; note = 2'-O-methyluridine-3'-phosphate
  modified_base 19: mod_base = OTHER; note = 2'-O-methyluridine-3'-phosphorothioate
  modified_base 20: mod_base = OTHER; note = 2'-O-methoxyethyl(MOE) guanosine-3'-phosphorothioate
  modified_base 21: mod_base = OTHER; note = 2'-O-methoxyethyl(MOE)-thymidine(or 5-methyluridine)-3'-phosphate-(N1-hydroxyethanol-N12[tris(N -acetylgalactosamine-triethyleneglycol)]-diamidodecane]
  misc_feature 1..10: note = RNA
  misc_feature 11: note = DNA
  misc_feature 12..21: note = RNA
ctagacctgttttgcttttgt

SEQ ID NO: 913 - RNA, 21 nt, synthetic construct
  source 1..21: mol_type = other RNA
  modified_base 1: mod_base = OTHER; note 2'-O-methoxyethyl(MOE)-5-methylcytidine-3'-phosphorothioate
  modified_base 2: mod_base = OTHER; note = 2'-O-methoxyethyl(MOE)-thymidine(or 5-methyluridine)-3'- phosphorothioate
  modified_base 3: mod_base = OTHER; note = 2'-O-methyladenosine-3'-phosphate
  modified_base 4: mod_base = OTHER; note = 2'-O-methylguanosine-3'-phosphate
  modified_base 5: mod_base = OTHER; note = 2'-O-methyladenosine-3'-phosphate
  modified_base 6: mod_base = OTHER; note = 2'-O-methylcytidine-3'-phosphate
  modified_base 7: mod_base = OTHER; note = 2'-fluorocytidine-3'-phosphate
  modified_base 8: mod_base = OTHER; note = 2'-O-methyluridine-3'-phosphate
  modified_base 9: mod_base = OTHER; note = 2'-fluoroguanosine-3'-phosphate
  modified_base 10: mod_base = OTHER; note = 2'-fluorouridine-3'-phosphate
  modified_base 11: mod_base = OTHER; note = 2'-fluorouridine-3'-phosphate
  modified_base 12: mod_base = OTHER; note = 2'-O-methyluridine-3'-phosphate
  modified_base 13: mod_base = OTHER; note = 2'-O-methyluridine-3'-phosphate
  modified_base 14: mod_base = OTHER; note = 2'-O-methylguanosine-3'-phosphate
  modified_base 15: mod_base = OTHER; note = 2'-O-methylcytidine-3'-phosphate
  modified_base 16: mod_base = OTHER; note = 2'-O-methyluridine-3'-phosphate
  modified_base 17: mod_base = OTHER; note = 2'-O-methyluridine-3'-phosphate
  modified_base 18: mod_base = OTHER; note = 2'-O-methyluridine-3'-phosphate
  modified_base 19: mod_base = OTHER; note = 2'-O-methyluridine-3'-phosphorothioate
  modified_base 20: mod_base = OTHER; note = 2'-O-methoxyethyl(MOE) guanosine-3'-phosphorothioate
  modified_base 21: mod_base = OTHER; note = 2'-O-methoxyethyl(MOE)-thymidine(or 5-methyluridine)-3'-phosphate-(N1-hydroxyethanol-N12[tris(N -acetylgalactosamine-triethyleneglycol)]-diamidodecane]
ctagacctgttttgcttttgt

SEQ ID NO: 914 - DNA, 21 bp, synthetic construct
  source 1..21: mol_type = other DNA
  modified_base 1: mod_base = OTHER; note 2'-O-methoxyethyl(MOE)-5-methylcytidine-3'-phosphorothioate
  modified_base 2: mod_base = OTHER; note = 2'-O-methoxyethyl(MOE)-thymidine(or 5-methyluridine)-3'- phosphorothioate
  modified_base 3: mod_base = OTHER; note = 2'-O-methyladenosine-3'-phosphate
  modified_base 4: mod_base = OTHER; note = 2'-O-methylguanosine-3'-phosphate
  modified_base 5: mod_base = OTHER; note = 2'-O-methyladenosine-3'-phosphate
  modified_base 6: mod_base = OTHER; note = 2'-O-methylcytidine-3'-phosphate
  modified_base 7: mod_base = OTHER; note = 2'-fluorocytidine-3'-phosphate
  modified_base 8: mod_base = OTHER; note = 2'-O-methyluridine-3'-phosphate
  modified_base 9: mod_base = OTHER; note = 2'-fluoroguanosine-3'-phosphate
  modified_base 10: mod_base = OTHER; note = 2'-fluorouridine-3'-phosphate
  modified_base 12: mod_base = OTHER; note = 2'-O-methyluridine-3'-phosphate
  modified_base 13: mod_base = OTHER; note = 2'-O-methyluridine-3'-phosphate
  modified_base 14: mod_base = OTHER; note = 2'-O-methylguanosine-3'-phosphate
  modified_base 15: mod_base = OTHER; note = 2'-O-methylcytidine-3'-phosphate
  modified_base 16: mod_base = OTHER; note = 2'-O-methyluridine-3'-phosphate
  modified_base 17: mod_base = OTHER; note = 2'-O-methyluridine-3'-phosphate
  modified_base 18: mod_base = OTHER; note = 2'-O-methyluridine-3'-phosphate
  modified_base 19: mod_base = OTHER; note = 2'-O-methyluridine-3'-phosphorothioate
  modified_base 20: mod_base = OTHER; note = 2'-O-methoxyethyl(MOE) guanosine-3'-phosphorothioate
  modified_base 21: mod_base = OTHER; note = 2'-O-methoxyethyl(MOE)-thymidine(or 5-methyluridine)-3'-phosphate-(N1-hydroxyethanol-N12[tris(N -acetylgalactosamine-triethyleneglycol)]-diamidodecane]
  misc_feature 1..10: note = RNA
  misc_feature 11: note = DNA
  misc_feature 12..21: note = RNA
ctagacctgttttgcttttgt

SEQ ID NO: 915 - RNA, 21 nt, synthetic construct
  source 1..21: mol_type = other RNA
  modified_base 1: mod_base = OTHER; note 2'-O-methoxyethyl(MOE)-5-methylcytidine-3'-phosphorothioate
  modified_base 2: mod_base = OTHER; note = 2'-O-methoxyethyl(MOE)-thymidine(or 5-methyluridine)-3'- phosphorothioate
  modified_base 3: mod_base = OTHER; note = 2'-O-methyladenosine-3'-phosphate
  modified_base 4: mod_base = OTHER; note = 2'-O-methylguanosine-3'-phosphate
  modified_base 5: mod_base = OTHER; note = 2'-O-methyladenosine-3'-phosphate
  modified_base 6: mod_base = OTHER; note = 2'-O-methylcytidine-3'-phosphate
  modified_base 7: mod_base = OTHER; note = 2'-fluorocytidine-3'-phosphate
  modified_base 8: mod_base = OTHER; note = 2'-O-methyluridine-3'-phosphate
  modified_base 9: mod_base = OTHER; note = 2'-fluoroguanosine-3'-phosphate
  modified_base 10: mod_base = OTHER; note = 2'-fluorouridine-3'-phosphate
  modified_base 11: mod_base = OTHER; note = 2'-fluorouridine-3'-phosphate
  modified_base 12: mod_base = OTHER; note = 2'-O-methyluridine-3'-phosphate
  modified_base 13: mod_base = OTHER; note = 2'-O-methyluridine-3'-phosphate
  modified_base 14: mod_base = OTHER; note = 2'-O-methylguanosine-3'-phosphate
  modified_base 15: mod_base = OTHER; note = 2'-O-methylcytidine-3'-phosphate
  modified_base 16: mod_base = OTHER; note = 2'-O-methyluridine-3'-phosphate
  modified_base 17: mod_base = OTHER; note = 2'-O-methyluridine-3'-phosphate
  modified_base 18: mod_base = OTHER; note = 2'-O-methyluridine-3'-phosphate
  modified_base 19: mod_base = OTHER; note = 2'-O-methyluridine-3'-phosphorothioate
  modified_base 20: mod_base = OTHER; note = 2'-O-methoxyethyl(MOE) guanosine-3'-phosphorothioate
  modified_base 21: mod_base = OTHER; note = 2'-O-methoxyethyl(MOE)-thymidine(or 5-methyluridine)-3'-phosphate-(N1-hydroxyethanol-N12[tris(N -acetylgalactosamine-triethyleneglycol)]-diamidodecane]
ctagacctgttttgcttttgt

SEQ ID NO: 916 - DNA, 21 bp, synthetic construct
  source 1..21: mol_type = other DNA
  modified_base 1: mod_base = OTHER; note 2'-O-methoxyethyl(MOE)-5-methylcytidine-3'-phosphorothioate
  modified_base 2: mod_base = OTHER; note = 2'-O-methoxyethyl(MOE)-thymidine(or 5-methyluridine)-3'- phosphorothioate
  modified_base 3: mod_base = OTHER; note = 2'-O-methyladenosine-3'-phosphate
  modified_base 4: mod_base = OTHER; note = 2'-O-methylguanosine-3'-phosphate
  modified_base 5: mod_base = OTHER; note = 2'-O-methyladenosine-3'-phosphate
  modified_base 6: mod_base = OTHER; note = 2'-O-methylcytidine-3'-phosphate
  modified_base 7: mod_base = OTHER; note = 2'-fluorocytidine-3'-phosphate
  modified_base 8: mod_base = OTHER; note = 2'-O-methyluridine-3'-phosphate
  modified_base 9: mod_base = OTHER; note = 2'-fluoroguanosine-3'-phosphate
  modified_base 10: mod_base = OTHER; note = 2'-fluorouridine-3'-phosphate
  modified_base 12: mod_base = OTHER; note = 2'-O-methyluridine-3'-phosphate
  modified_base 13: mod_base = OTHER; note = 2'-O-methyluridine-3'-phosphate
  modified_base 14: mod_base = OTHER; note = 2'-O-methylguanosine-3'-phosphate
  modified_base 15: mod_base = OTHER; note = 2'-O-methylcytidine-3'-phosphate
  modified_base 16: mod_base = OTHER; note = 2'-O-methyluridine-3'-phosphate
  modified_base 17: mod_base = OTHER; note = 2'-O-methyluridine-3'-phosphate
  modified_base 18: mod_base = OTHER; note = 2'-O-methyluridine-3'-phosphate
  modified_base 19: mod_base = OTHER; note = 2'-O-methyluridine-3'-phosphate
  modified_base 20: mod_base = OTHER; note = 2'-O-methoxyethyl(MOE) guanosine-3'-phosphate
  modified_base 21: mod_base = OTHER; note = 2'-O-methoxyethyl(MOE)-thymidine(or 5-methyluridine)-3'-phosphate-(N1-hydroxyethanol-N12[tris(N -acetylgalactosamine-triethyleneglycol)]-diamidodecane]
  misc_feature 1..10: note = RNA
  misc_feature 11: note = DNA
  misc_feature 12..21: note = RNA
ctagacctgttttgcttttgt

SEQ ID NO: 917 - DNA, 21 bp, synthetic construct
  source 1..21: mol_type = other DNA
  modified_base 1: mod_base = OTHER; note 2'-O-methoxyethyl(MOE)-5-methylcytidine-3'-phosphorothioate
  modified_base 2: mod_base = OTHER; note = 2'-O-methoxyethyl(MOE)-thymidine(or 5-methyluridine)-3'- phosphorothioate
  modified_base 3: mod_base = OTHER; note = 2'-O-methyladenosine-3'-phosphate
  modified_base 4: mod_base = OTHER; note = 2'-O-methylguanosine-3'-phosphate
  modified_base 5: mod_base = OTHER; note = 2'-O-methyladenosine-3'-phosphate
  modified_base 6: mod_base = OTHER; note = 2'-O-methylcytidine-3'-phosphate
  modified_base 7: mod_base = OTHER; note = 2'-fluorocytidine-3'-phosphate
  modified_base 8: mod_base = OTHER; note = 2'-O-methyluridine-3'-phosphate
  modified_base 9: mod_base = OTHER; note = 2'-fluoroguanosine-3'-phosphate
  modified_base 10: mod_base = OTHER; note = 2'-fluorouridine-3'-phosphate
  modified_base 12: mod_base = OTHER; note = 2'-O-methyluridine-3'-phosphate
  modified_base 13: mod_base = OTHER; note = 2'-O-methyluridine-3'-phosphate
  modified_base 14: mod_base = OTHER; note = 2'-O-methylguanosine-3'-phosphate
  modified_base 15: mod_base = OTHER; note = 2'-O-methylcytidine-3'-phosphate
  modified_base 16: mod_base = OTHER; note = 2'-O-methyluridine-3'-phosphate
  modified_base 17: mod_base = OTHER; note = 2'-O-methyluridine-3'-phosphate
  modified_base 18: mod_base = OTHER; note = 2'-O-methyluridine-3'-phosphate
  modified_base 19: mod_base = OTHER; note = 2'-O-methyluridine-3'-phosphorothioate
  modified_base 20: mod_base = OTHER; note = 2'-O-methoxyethyl(MOE) guanosine-3'-phosphorothioate
  modified_base 21: mod_base = OTHER; note = 2'-O-methoxyethyl(MOE)-thymidine(or 5-methyluridine)-3'-phosphate-(N1-hydroxyethanol-N12[tris(N -acetylgalactosamine-triethyleneglycol)]-diamidodecane]
  misc_feature 1..10: note = RNA
  misc_feature 11: note = DNA
  misc_feature 12..21: note = RNA
ctagacctgttttgcttttgt

SEQ ID NO: 918 - DNA, 21 bp, synthetic construct
  source 1..21: mol_type = other DNA
  modified_base 1: mod_base = OTHER; note = Cytosine threose nucleic acid-2'-phosphorothioate
  modified_base 2: mod_base = OTHER; note = Uracil threose nucleic acid-2'-phosphorothioate
  modified_base 3: mod_base = OTHER; note = 2'-O-methyladenosine-3'-phosphate
  modified_base 4: mod_base = OTHER; note = 2'-O-methylguanosine-3'-phosphate
  modified_base 5: mod_base = OTHER; note = 2'-O-methyladenosine-3'-phosphate
  modified_base 6: mod_base = OTHER; note = 2'-O-methylcytidine-3'-phosphate
  modified_base 7: mod_base = OTHER; note = 2'-fluorocytidine-3'-phosphate
  modified_base 8: mod_base = OTHER; note = 2'-O-methyluridine-3'-phosphate
  modified_base 9: mod_base = OTHER; note = 2'-fluoroguanosine-3'-phosphate
  modified_base 10: mod_base = OTHER; note = 2'-fluorouridine-3'-phosphate
  modified_base 12: mod_base = OTHER; note = 2'-O-methyluridine-3'-phosphate
  modified_base 13: mod_base = OTHER; note = 2'-O-methyluridine-3'-phosphate
  modified_base 14: mod_base = OTHER; note = 2'-O-methylguanosine-3'-phosphate
  modified_base 15: mod_base = OTHER; note = 2'-O-methylcytidine-3'-phosphate
  modified_base 16: mod_base = OTHER; note = 2'-O-methyluridine-3'-phosphate
  modified_base 17: mod_base = OTHER; note = 2'-O-methyluridine-3'-phosphate
  modified_base 18: mod_base = OTHER; note = 2'-O-methyluridine-3'-phosphate
  modified_base 19: mod_base = OTHER; note = 2'-O-methyluridine-3'-phosphate
  modified_base 20: mod_base = OTHER; note = Guanine threose nucleic acid-2'-phosphate
  modified_base 21: mod_base = OTHER; note = Uracil threose nucleic acid-2'-phosphate-(N1-hydroxyethanol-N12[tris(N-acetylgalac tosamine-triethyleneglycol)]-diamidodecane]
  misc_feature 1..10: note = RNA
  misc_feature 11: note = DNA
  misc_feature 12..21: note = RNA
ctagacctgttttgcttttgt

SEQ ID NO: 919 - DNA, 21 bp, synthetic construct
  source 1..21: mol_type = other DNA
  modified_base 1: mod_base = OTHER; note = Cytosine threose nucleic acid-2'-phosphorothioate
  modified_base 2: mod_base = OTHER; note = Uracil threose nucleic acid-2'-phosphorothioate
  modified_base 3: mod_base = OTHER; note = 2'-O-methyladenosine-3'-phosphate
  modified_base 4: mod_base = OTHER; note = 2'-O-methylguanosine-3'-phosphate
  modified_base 5: mod_base = OTHER; note = 2'-O-methyladenosine-3'-phosphate
  modified_base 6: mod_base = OTHER; note = 2'-O-methylcytidine-3'-phosphate
  modified_base 7: mod_base = OTHER; note = 2'-fluorocytidine-3'-phosphate
  modified_base 8: mod_base = OTHER; note = 2'-O-methyluridine-3'-phosphate
  modified_base 9: mod_base = OTHER; note = 2'-fluoroguanosine-3'-phosphate
  modified_base 10: mod_base = OTHER; note = 2'-fluorouridine-3'-phosphate
  modified_base 12: mod_base = OTHER; note = 2'-O-methyluridine-3'-phosphate
  modified_base 13: mod_base = OTHER; note = 2'-O-methyluridine-3'-phosphate
  modified_base 14: mod_base = OTHER; note = 2'-O-methylguanosine-3'-phosphate
  modified_base 15: mod_base = OTHER; note = 2'-O-methylcytidine-3'-phosphate
  modified_base 16: mod_base = OTHER; note = 2'-O-methyluridine-3'-phosphate
  modified_base 17: mod_base = OTHER; note = 2'-O-methyluridine-3'-phosphate
  modified_base 18: mod_base = OTHER; note = 2'-O-methyluridine-3'-phosphate
  modified_base 19: mod_base = OTHER; note = 2'-O-methyluridine-3'-phosphorothioate
  modified_base 20: mod_base = OTHER; note = Guanine threose nucleic acid-2'-phosphorothioate
  modified_base 21: mod_base = OTHER; note = Uracil threose nucleic acid-2'-phosphate-(N1-hydroxyethanol-N12[tris(N-acetylgalac tosamine-triethyleneglycol)]-diamidodecane]
  misc_feature 1..10: note = RNA
  misc_feature 11: note = DNA
  misc_feature 12..21: note = RNA
ctagacctgttttgcttttgt

SEQ ID NO: 920 - DNA, 21 bp, synthetic construct
  source 1..21: mol_type = other DNA
  modified_base 1: mod_base = OTHER; note = Cytosine threose nucleic acid-2'-phosphorothioate
  modified_base 2: mod_base = OTHER; note = Uracil threose nucleic acid-2'-phosphorothioate
  modified_base 3: mod_base = OTHER; note = 2'-O-methyladenosine-3'-phosphate
  modified_base 4: mod_base = OTHER; note = 2'-O-methylguanosine-3'-phosphate
  modified_base 5: mod_base = OTHER; note = 2'-O-methyladenosine-3'-phosphate
  modified_base 6: mod_base = OTHER; note = 2'-O-methylcytidine-3'-phosphate
  modified_base 7: mod_base = OTHER; note = 2'-fluorocytidine-3'-phosphate
  modified_base 8: mod_base = OTHER; note = 2'-O-methyluridine-3'-phosphate
  modified_base 9: mod_base = OTHER; note = 2'-fluoroguanosine-3'-phosphate
  modified_base 10: mod_base = OTHER; note = 2'-fluorouridine-3'-phosphate
  modified_base 12: mod_base = OTHER; note = 2'-O-methyluridine-3'-phosphate
  modified_base 13: mod_base = OTHER; note = 2'-O-methyluridine-3'-phosphate
  modified_base 14: mod_base = OTHER; note = 2'-O-methylguanosine-3'-phosphate
  modified_base 15: mod_base = OTHER; note = 2'-O-methylcytidine-3'-phosphate
  modified_base 16: mod_base = OTHER; note = 2'-O-methyluridine-3'-phosphate
  modified_base 17: mod_base = OTHER; note = 2'-O-methyluridine-3'-phosphate
  modified_base 18: mod_base = OTHER; note = 2'-O-methyluridine-3'-phosphate
  modified_base 19: mod_base = OTHER; note = 2'-O-methyluridine-3'-phosphate
  modified_base 20: mod_base = OTHER; note = Guanine threose nucleic acid-2'-phosphate
  modified_base 21: mod_base = OTHER; note = Uracil threose nucleic acid-2'-phosphate-(N1-hydroxyethanol-N12[tris(N-acetylgalac tosamine-triethyleneglycol)]-diamidodecane]
  misc_feature 1..10: note = RNA
  misc_feature 11: note = DNA
  misc_feature 12..21: note = RNA
ctagacctgttttgcttttgt

SEQ ID NO: 921 - DNA, 21 bp, synthetic construct
  source 1..21: mol_type = other DNA
  modified_base 1: mod_base = OTHER; note = Cytosine threose nucleic acid-2'-phosphorothioate
  modified_base 2: mod_base = OTHER; note = Uracil threose nucleic acid-2'-phosphorothioate
  modified_base 3: mod_base = OTHER; note = 2'-O-methyladenosine-3'-phosphate
  modified_base 4: mod_base = OTHER; note = 2'-O-methylguanosine-3'-phosphate
  modified_base 5: mod_base = OTHER; note = 2'-O-methyladenosine-3'-phosphate
  modified_base 6: mod_base = OTHER; note = 2'-O-methylcytidine-3'-phosphate
  modified_base 7: mod_base = OTHER; note = 2'-fluorocytidine-3'-phosphate
  modified_base 8: mod_base = OTHER; note = 2'-O-methyluridine-3'-phosphate
  modified_base 9: mod_base = OTHER; note = 2'-fluoroguanosine-3'-phosphate
  modified_base 10: mod_base = OTHER; note = 2'-fluorouridine-3'-phosphate
  modified_base 12: mod_base = OTHER; note = 2'-O-methyluridine-3'-phosphate
  modified_base 13: mod_base = OTHER; note = 2'-O-methyluridine-3'-phosphate
  modified_base 14: mod_base = OTHER; note = 2'-O-methylguanosine-3'-phosphate
  modified_base 15: mod_base = OTHER; note = 2'-O-methylcytidine-3'-phosphate
  modified_base 16: mod_base = OTHER; note = 2'-O-methyluridine-3'-phosphate
  modified_base 17: mod_base = OTHER; note = 2'-O-methyluridine-3'-phosphate
  modified_base 18: mod_base = OTHER; note = 2'-O-methyluridine-3'-phosphate
  modified_base 19: mod_base = OTHER; note = 2'-O-methyluridine-3'-phosphorothioate
  modified_base 20: mod_base = OTHER; note = Guanine threose nucleic acid-2'-phosphorothioate
  modified_base 21: mod_base = OTHER; note = Uracil threose nucleic acid-2'-phosphate-(N1-hydroxyethanol-N12[tris(N-acetylgalac tosamine-triethyleneglycol)]-diamidodecane]
  misc_feature 1..10: note = RNA
  misc_feature 11: note = DNA
  misc_feature 12..21: note = RNA
ctagacctgttttgcttttgt

SEQ ID NO: 922 - RNA, 21 nt, synthetic construct
  source 1..21: mol_type = other RNA
  modified_base 1: mod_base = OTHER; note 2'-O-methoxyethyl(MOE)-5-methylcytidine-3'-phosphorothioate
  modified_base 2: mod_base = OTHER; note = 2'-O-methoxyethyl(MOE) adenosine-3'-phosphorothioate
  modified_base 3: mod_base = OTHER; note = 2'-O-methyladenosine-3'-phosphate
  modified_base 4: mod_base = OTHER; note = 2'-O-methylguanosine-3'-phosphate
  modified_base 5: mod_base = OTHER; note = 2'-O-methylcytidine-3'-phosphate
  modified_base 6: mod_base = OTHER; note = 2'-O-methyladenosine-3'-phosphate
  modified_base 7: mod_base = OTHER; note = 2'-fluoroguanosine-3'-phosphate
  modified_base 8: mod_base = OTHER; note = 2'-O-methyladenosine-3'-phosphate
  modified_base 9: mod_base = OTHER; note = 2'-fluorocytidine-3'-phosphate
  modified_base 10: mod_base = OTHER; note = 2'-fluoroadenosine-3'-phosphate
  modified_base 11: mod_base = OTHER; note = 2'-fluorouridine-3'-phosphate
  modified_base 12: mod_base = OTHER; note = 2'-O-methyluridine-3'-phosphate
  modified_base 13: mod_base = OTHER; note = 2'-O-methyluridine-3'-phosphate
  modified_base 14: mod_base = OTHER; note = 2'-O-methyladenosine-3'-phosphate
  modified_base 15: mod_base = OTHER; note = 2'-O-methyluridine-3'-phosphate
  modified_base 16: mod_base = OTHER; note = 2'-O-methylcytidine-3'-phosphate
  modified_base 17: mod_base = OTHER; note = 2'-O-methyluridine-3'-phosphate
  modified_base 18: mod_base = OTHER; note = 2'-O-methyluridine-3'-phosphate
  modified_base 19: mod_base = OTHER; note = 2'-O-methyluridine-3'-phosphate
  modified_base 20: mod_base = OTHER; note = 2'-O-methoxyethyl(MOE)-thymidine(or 5-methyluridine)-3'-phosphate
  modified_base 21: mod_base = OTHER; note = 2'-O-methoxyethyl(MOE) adenosine-3'-phosphate-(N1-hydroxyethanol-N12[tris(N-acetyl galactosamine-triethyleneglycol)]-diamidodecane]
caagcagacatttatctttta

SEQ ID NO: 923 - RNA, 21 nt, synthetic construct
  source 1..21: mol_type = other RNA
  modified_base 1: mod_base = OTHER; note 2'-O-methoxyethyl(MOE)-5-methylcytidine-3'-phosphorothioate
  modified_base 2: mod_base = OTHER; note = 2'-O-methoxyethyl(MOE) adenosine-3'-phosphorothioate
  modified_base 3: mod_base = OTHER; note = 2'-O-methyladenosine-3'-phosphate
  modified_base 4: mod_base = OTHER; note = 2'-O-methylcytidine-3'-phosphate
  modified_base 5: mod_base = OTHER; note = 2'-O-methyluridine-3'-phosphate
  modified_base 6: mod_base = OTHER; note = 2'-O-methyluridine-3'-phosphate
  modified_base 7: mod_base = OTHER; note = 2'-fluorouridine-3'-phosphate
  modified_base 8: mod_base = OTHER; note = 2'-O-methyluridine-3'-phosphate
  modified_base 9: mod_base = OTHER; note = 2'-fluorocytidine-3'-phosphate
  modified_base 10: mod_base = OTHER; note = 2'-fluorouridine-3'-phosphate
  modified_base 11: mod_base = OTHER; note = 2'-fluoroadenosine-3'-phosphate
  modified_base 12: mod_base = OTHER; note = 2'-O-methylguanosine-3'-phosphate
  modified_base 13: mod_base = OTHER; note = 2'-O-methyladenosine-3'-phosphate
  modified_base 14: mod_base = OTHER; note = 2'-O-methylcytidine-3'-phosphate
  modified_base 15: mod_base = OTHER; note = 2'-O-methylcytidine-3'-phosphate
  modified_base 16: mod_base = OTHER; note = 2'-O-methyluridine-3'-phosphate
  modified_base 17: mod_base = OTHER; note = 2'-O-methylguanosine-3'-phosphate
  modified_base 18: mod_base = OTHER; note = 2'-O-methyluridine-3'-phosphate
  modified_base 19: mod_base = OTHER; note = 2'-O-methyluridine-3'-phosphate
  modified_base 20: mod_base = OTHER; note = 2'-O-methoxyethyl(MOE)-thymidine(or 5-methyluridine)-3'-phosphate
  modified_base 21: mod_base = OTHER; note = 2'-O-methoxyethyl(MOE)-thymidine(or 5-methyluridine)-3'-phosphate-(N1-hydroxyethanol-N12[tris(N -acetylgalactosamine-triethyleneglycol)]-diamidodecane]
caacttttctagacctgtttt

SEQ ID NO: 924 - RNA, 21 nt, synthetic construct
  source 1..21: mol_type = other RNA
  modified_base 1: mod_base = OTHER; note = 2'-O-methoxyethyl(MOE) guanosine-3'-phosphorothioate
  modified_base 2: mod_base = OTHER; note 2'-O-methoxyethyl(MOE)-5-methylcytidine-3'-phosphorothioate
  modified_base 3: mod_base = OTHER; note = 2'-O-methyluridine-3'-phosphate
  modified_base 4: mod_base = OTHER; note = 2'-O-methyluridine-3'-phosphate
  modified_base 5: mod_base = OTHER; note = 2'-O-methyluridine-3'-phosphate
  modified_base 6: mod_base = OTHER; note = 2'-O-methyluridine-3'-phosphate
  modified_base 7: mod_base = OTHER; note = 2'-fluoroguanosine-3'-phosphate
  modified_base 8: mod_base = OTHER; note = 2'-O-methyluridine-3'-phosphate
  modified_base 9: mod_base = OTHER; note = 2'-fluoroadenosine-3'-phosphate
  modified_base 10: mod_base = OTHER; note = 2'-fluoroadenosine-3'-phosphate
  modified_base 11: mod_base = OTHER; note = 2'-fluorocytidine-3'-phosphate
  modified_base 12: mod_base = OTHER; note = 2'-O-methyluridine-3'-phosphate
  modified_base 13: mod_base = OTHER; note = 2'-O-methyluridine-3'-phosphate
  modified_base 14: mod_base = OTHER; note = 2'-O-methylguanosine-3'-phosphate
  modified_base 15: mod_base = OTHER; note = 2'-O-methyladenosine-3'-phosphate
  modified_base 16: mod_base = OTHER; note = 2'-O-methyladenosine-3'-phosphate
  modified_base 17: mod_base = OTHER; note = 2'-O-methylguanosine-3'-phosphate
  modified_base 18: mod_base = OTHER; note = 2'-O-methyladenosine-3'-phosphate
  modified_base 19: mod_base = OTHER; note = 2'-O-methyluridine-3'-phosphate
  modified_base 20: mod_base = OTHER; note = 2'-O-methoxyethyl(MOE) adenosine-3'-phosphate
  modified_base 21: mod_base = OTHER; note = 2'-O-methoxyethyl(MOE)-thymidine(or 5-methyluridine)-3'-phosphate-(N1-hydroxyethanol-N12[tris(N -acetylgalactosamine-triethyleneglycol)]-diamidodecane]
gcttttgtaacttgaagatat

SEQ ID NO: 925 - RNA, 21 nt, synthetic construct
  source 1..21: mol_type = other RNA
  modified_base 1: mod_base = OTHER; note = 2'-O-methoxyethyl(MOE)-thymidine(or 5-methyluridine)-3'- phosphorothioate
  modified_base 2: mod_base = OTHER; note = 2'-O-methoxyethyl(MOE)-thymidine(or 5-methyluridine)-3'- phosphorothioate
  modified_base 3: mod_base = OTHER; note = 2'-O-methylguanosine-3'-phosphate
  modified_base 4: mod_base = OTHER; note = 2'-O-methyladenosine-3'-phosphate
  modified_base 5: mod_base = OTHER; note = 2'-O-methyladenosine-3'-phosphate
  modified_base 6: mod_base = OTHER; note = 2'-O-methylguanosine-3'-phosphate
  modified_base 7: mod_base = OTHER; note = 2'-fluorouridine-3'-phosphate
  modified_base 8: mod_base = OTHER; note = 2'-O-methyluridine-3'-phosphate
  modified_base 9: mod_base = OTHER; note = 2'-fluoroguanosine-3'-phosphate
  modified_base 10: mod_base = OTHER; note = 2'-fluorocytidine-3'-phosphate
  modified_base 11: mod_base = OTHER; note = 2'-fluorocytidine-3'-phosphate
  modified_base 12: mod_base = OTHER; note = 2'-O-methylcytidine-3'-phosphate
  modified_base 13: mod_base = OTHER; note = 2'-O-methylcytidine-3'-phosphate
  modified_base 14: mod_base = OTHER; note = 2'-O-methyladenosine-3'-phosphate
  modified_base 15: mod_base = OTHER; note = 2'-O-methyluridine-3'-phosphate
  modified_base 16: mod_base = OTHER; note = 2'-O-methylguanosine-3'-phosphate
  modified_base 17: mod_base = OTHER; note = 2'-O-methyluridine-3'-phosphate
  modified_base 18: mod_base = OTHER; note = 2'-O-methylcytidine-3'-phosphate
  modified_base 19: mod_base = OTHER; note = 2'-O-methylguanosine-3'-phosphate
  modified_base 20: mod_base = OTHER; note = 2'-O-methoxyethyl(MOE) adenosine-3'-phosphate
  modified_base 21: mod_base = OTHER; note = 2'-O-methoxyethyl(MOE) adenosine-3'-phosphate-(N1-hydroxyethanol-N12[tris(N-acetyl galactosamine-triethyleneglycol)]-diamidodecane]
ttgaagttgccccatgtcgaa

SEQ ID NO: 926 - RNA, 21 nt, synthetic construct
  source 1..21: mol_type = other RNA
  modified_base 1: mod_base = OTHER; note 2'-O-methoxyethyl(MOE)-5-methylcytidine-3'-phosphorothioate
  modified_base 2: mod_base = OTHER; note 2'-O-methoxyethyl(MOE)-5-methylcytidine-3'-phosphorothioate
  modified_base 3: mod_base = OTHER; note = 2'-O-methyluridine-3'-phosphate
  modified_base 4: mod_base = OTHER; note = 2'-O-methylcytidine-3'-phosphate
  modified_base 5: mod_base = OTHER; note = 2'-O-methyladenosine-3'-phosphate
  modified_base 6: mod_base = OTHER; note = 2'-O-methyluridine-3'-phosphate
  modified_base 7: mod_base = OTHER; note = 2'-fluoroadenosine-3'-phosphate
  modified_base 8: mod_base = OTHER; note = 2'-O-methylguanosine-3'-phosphate
  modified_base 9: mod_base = OTHER; note = 2'-fluoroguanosine-3'-phosphate
  modified_base 10: mod_base = OTHER; note = 2'-fluorocytidine-3'-phosphate
  modified_base 11: mod_base = OTHER; note = 2'-fluorocytidine-3'-phosphate
  modified_base 12: mod_base = OTHER; note = 2'-O-methyluridine-3'-phosphate
  modified_base 13: mod_base = OTHER; note = 2'-O-methylguanosine-3'-phosphate
  modified_base 14: mod_base = OTHER; note = 2'-O-methylguanosine-3'-phosphate
  modified_base 15: mod_base = OTHER; note = 2'-O-methyladenosine-3'-phosphate
  modified_base 16: mod_base = OTHER; note = 2'-O-methylguanosine-3'-phosphate
  modified_base 17: mod_base = OTHER; note = 2'-O-methyluridine-3'-phosphate
  modified_base 18: mod_base = OTHER; note = 2'-O-methyluridine-3'-phosphate
  modified_base 19: mod_base = OTHER; note = 2'-O-methyluridine-3'-phosphate
  modified_base 20: mod_base = OTHER; note = 2'-O-methoxyethyl(MOE) adenosine-3'-phosphate
  modified_base 21: mod_base = OTHER; note = 2'-O-methoxyethyl(MOE)-thymidine(or 5-methyluridine)-3'-phosphate-(N1-hydroxyethanol-N12[tris(N -acetylgalactosamine-triethyleneglycol)]-diamidodecane]
cctcataggcctggagtttat

SEQ ID NO: 927 - RNA, 21 nt, synthetic construct
  source 1..21: mol_type = other RNA
  modified_base 1: mod_base = OTHER; note = 2'-O-methoxyethyl(MOE) adenosine-3'-phosphorothioate
  modified_base 2: mod_base = OTHER; note = 2'-O-methoxyethyl(MOE) adenosine-3'-phosphorothioate
  modified_base 3: mod_base = OTHER; note = 2'-O-methylguanosine-3'-phosphate
  modified_base 4: mod_base = OTHER; note = 2'-O-methylcytidine-3'-phosphate
  modified_base 5: mod_base = OTHER; note = 2'-O-methylcytidine-3'-phosphate
  modified_base 6: mod_base = OTHER; note = 2'-O-methyladenosine-3'-phosphate
  modified_base 7: mod_base = OTHER; note = 2'-fluoroadenosine-3'-phosphate
  modified_base 8: mod_base = OTHER; note = 2'-O-methylguanosine-3'-phosphate
  modified_base 9: mod_base = OTHER; note = 2'-fluorocytidine-3'-phosphate
  modified_base 10: mod_base = OTHER; note = 2'-fluorocytidine-3'-phosphate
  modified_base 11: mod_base = OTHER; note = 2'-fluorouridine-3'-phosphate
  modified_base 12: mod_base = OTHER; note = 2'-O-methylcytidine-3'-phosphate
  modified_base 13: mod_base = OTHER; note = 2'-O-methyluridine-3'-phosphate
  modified_base 14: mod_base = OTHER; note = 2'-O-methyluridine-3'-phosphate
  modified_base 15: mod_base = OTHER; note = 2'-O-methylcytidine-3'-phosphate
  modified_base 16: mod_base = OTHER; note = 2'-O-methyluridine-3'-phosphate
  modified_base 17: mod_base = OTHER; note = 2'-O-methyluridine-3'-phosphate
  modified_base 18: mod_base = OTHER; note = 2'-O-methyladenosine-3'-phosphate
  modified_base 19: mod_base = OTHER; note = 2'-O-methylcytidine-3'-phosphate
  modified_base 20: mod_base = OTHER; note = 2'-O-methoxyethyl(MOE)-thymidine(or 5-methyluridine)-3'-phosphate
  modified_base 21: mod_base = OTHER; note = 2'-O-methoxyethyl(MOE)-thymidine(or 5-methyluridine)-3'-phosphate-(N1-hydroxyethanol-N12[tris(N -acetylgalactosamine-triethyleneglycol)]-diamidodecane]
aagccaagcctcttcttactt

SEQ ID NO: 928 - RNA, 21 nt, synthetic construct
  source 1..21: mol_type = other RNA
  modified_base 1: mod_base = OTHER; note = 2'-O-methoxyethyl(MOE) adenosine-3'-phosphorothioate
  modified_base 2: mod_base = OTHER; note = 2'-O-methoxyethyl(MOE) guanosine-3'-phosphorothioate
  modified_base 3: mod_base = OTHER; note = 2'-O-methylcytidine-3'-phosphate
  modified_base 4: mod_base = OTHER; note = 2'-O-methylcytidine-3'-phosphate
  modified_base 5: mod_base = OTHER; note = 2'-O-methyladenosine-3'-phosphate
  modified_base 6: mod_base = OTHER; note = 2'-O-methyladenosine-3'-phosphate
  modified_base 7: mod_base = OTHER; note = 2'-fluoroguanosine-3'-phosphate
  modified_base 8: mod_base = OTHER; note = 2'-O-methylcytidine-3'-phosphate
  modified_base 9: mod_base = OTHER; note = 2'-fluorocytidine-3'-phosphate
  modified_base 10: mod_base = OTHER; note = 2'-fluorouridine-3'-phosphate
  modified_base 11: mod_base = OTHER; note = 2'-fluorocytidine-3'-phosphate
  modified_base 12: mod_base = OTHER; note = 2'-O-methyluridine-3'-phosphate
  modified_base 13: mod_base = OTHER; note = 2'-O-methyluridine-3'-phosphate
  modified_base 14: mod_base = OTHER; note = 2'-O-methylcytidine-3'-phosphate
  modified_base 15: mod_base = OTHER; note = 2'-O-methyluridine-3'-phosphate
  modified_base 16: mod_base = OTHER; note = 2'-O-methyluridine-3'-phosphate
  modified_base 17: mod_base = OTHER; note = 2'-O-methyladenosine-3'-phosphate
  modified_base 18: mod_base = OTHER; note = 2'-O-methylcytidine-3'-phosphate
  modified_base 19: mod_base = OTHER; note = 2'-O-methyluridine-3'-phosphate
  modified_base 20: mod_base = OTHER; note = 2'-O-methoxyethyl(MOE)-thymidine(or 5-methyluridine)-3'-phosphate
  modified_base 21: mod_base = OTHER; note = 2'-O-methoxyethyl(MOE) adenosine-3'-phosphate-(N1-hydroxyethanol-N12[tris(N-acetyl galactosamine-triethyleneglycol)]-diamidodecane]
agccaagcctcttcttactta

SEQ ID NO: 929 - RNA, 21 nt, synthetic construct
  source 1..21: mol_type = other RNA
  modified_base 1: mod_base = OTHER; note = 2'-O-methoxyethyl(MOE)-thymidine(or 5-methyluridine)-3'- phosphorothioate
  modified_base 2: mod_base = OTHER; note = 2'-O-methoxyethyl(MOE)-thymidine(or 5-methyluridine)-3'- phosphorothioate
  modified_base 3: mod_base = OTHER; note = 2'-O-methyluridine-3'-phosphate
  modified_base 4: mod_base = OTHER; note = 2'-O-methyluridine-3'-phosphate
  modified_base 5: mod_base = OTHER; note = 2'-O-methylcytidine-3'-phosphate
  modified_base 6: mod_base = OTHER; note = 2'-O-methyluridine-3'-phosphate
  modified_base 7: mod_base = OTHER; note = 2'-fluoroadenosine-3'-phosphate
  modified_base 8: mod_base = OTHER; note = 2'-O-methylguanosine-3'-phosphate
  modified_base 9: mod_base = OTHER; note = 2'-fluoroadenosine-3'-phosphate
  modified_base 10: mod_base = OTHER; note = 2'-fluorocytidine-3'-phosphate
  modified_base 11: mod_base = OTHER; note = 2'-fluorocytidine-3'-phosphate
  modified_base 12: mod_base = OTHER; note = 2'-O-methyluridine-3'-phosphate
  modified_base 13: mod_base = OTHER; note = 2'-O-methylguanosine-3'-phosphate
  modified_base 14: mod_base = OTHER; note = 2'-O-methyluridine-3'-phosphate
  modified_base 15: mod_base = OTHER; note = 2'-O-methyluridine-3'-phosphate
  modified_base 16: mod_base = OTHER; note = 2'-O-methyluridine-3'-phosphate
  modified_base 17: mod_base = OTHER; note = 2'-O-methyluridine-3'-phosphate
  modified_base 18: mod_base = OTHER; note = 2'-O-methylguanosine-3'-phosphate
  modified_base 19: mod_base = OTHER; note = 2'-O-methylcytidine-3'-phosphate
  modified_base 20: mod_base = OTHER; note = 2'-O-methoxyethyl(MOE)-thymidine(or 5-methyluridine)-3'-phosphate
  modified_base 21: mod_base = OTHER; note = 2'-O-methoxyethyl(MOE)-thymidine(or 5-methyluridine)-3'-phosphate-(N1-hydroxyethanol-N12[tris(N -acetylgalactosamine-triethyleneglycol)]-diamidodecane]
ttttctagacctgttttgctt

SEQ ID NO: 930 - RNA, 21 nt, synthetic construct
  source 1..21: mol_type = other RNA
  modified_base 1: mod_base = OTHER; note = 2'-O-methoxyethyl(MOE) adenosine-3'-phosphorothioate
  modified_base 2: mod_base = OTHER; note = 2'-O-methoxyethyl(MOE) guanosine-3'-phosphorothioate
  modified_base 3: mod_base = OTHER; note = 2'-O-methyladenosine-3'-phosphate
  modified_base 4: mod_base = OTHER; note = 2'-O-methylcytidine-3'-phosphate
  modified_base 5: mod_base = OTHER; note = 2'-O-methylcytidine-3'-phosphate
  modified_base 6: mod_base = OTHER; note = 2'-O-methyluridine-3'-phosphate
  modified_base 7: mod_base = OTHER; note = 2'-fluoroguanosine-3'-phosphate
  modified_base 8: mod_base = OTHER; note = 2'-O-methyluridine-3'-phosphate
  modified_base 9: mod_base = OTHER; note = 2'-fluorouridine-3'-phosphate
  modified_base 10: mod_base = OTHER; note = 2'-fluorouridine-3'-phosphate
  modified_base 11: mod_base = OTHER; note = 2'-fluorouridine-3'-phosphate
  modified_base 12: mod_base = OTHER; note = 2'-O-methylguanosine-3'-phosphate
  modified_base 13: mod_base = OTHER; note = 2'-O-methylcytidine-3'-phosphate
  modified_base 14: mod_base = OTHER; note = 2'-O-methyluridine-3'-phosphate
  modified_base 15: mod_base = OTHER; note = 2'-O-methyluridine-3'-phosphate
  modified_base 16: mod_base = OTHER; note = 2'-O-methyluridine-3'-phosphate
  modified_base 17: mod_base = OTHER; note = 2'-O-methyluridine-3'-phosphate
  modified_base 18: mod_base = OTHER; note = 2'-O-methylguanosine-3'-phosphate
  modified_base 19: mod_base = OTHER; note = 2'-O-methyluridine-3'-phosphate
  modified_base 20: mod_base = OTHER; note = 2'-O-methoxyethyl(MOE) adenosine-3'-phosphate
  modified_base 21: mod_base = OTHER; note = 2'-O-methoxyethyl(MOE) adenosine-3'-phosphate-(N1-hydroxyethanol-N12[tris(N-acetyl galactosamine-triethyleneglycol)]-diamidodecane]
agacctgttttgcttttgtaa

SEQ ID NO: 931 - RNA, 21 nt, synthetic construct
  source 1..21: mol_type = other RNA
  modified_base 1: mod_base = OTHER; note = 2'-O-methoxyethyl(MOE)-thymidine(or 5-methyluridine)-3'- phosphorothioate
  modified_base 2: mod_base = OTHER; note = 2'-O-methoxyethyl(MOE)-thymidine(or 5-methyluridine)-3'- phosphorothioate
  modified_base 3: mod_base = OTHER; note = 2'-O-methylguanosine-3'-phosphate
  modified_base 4: mod_base = OTHER; note = 2'-O-methyluridine-3'-phosphate
  modified_base 5: mod_base = OTHER; note = 2'-O-methyladenosine-3'-phosphate
  modified_base 6: mod_base = OTHER; note = 2'-O-methyladenosine-3'-phosphate
  modified_base 7: mod_base = OTHER; note = 2'-fluorocytidine-3'-phosphate
  modified_base 8: mod_base = OTHER; note = 2'-O-methyluridine-3'-phosphate
  modified_base 9: mod_base = OTHER; note = 2'-fluorouridine-3'-phosphate
  modified_base 10: mod_base = OTHER; note = 2'-fluoroguanosine-3'-phosphate
  modified_base 11: mod_base = OTHER; note = 2'-fluoroadenosine-3'-phosphate
  modified_base 12: mod_base = OTHER; note = 2'-O-methyladenosine-3'-phosphate
  modified_base 13: mod_base = OTHER; note = 2'-O-methylguanosine-3'-phosphate
  modified_base 14: mod_base = OTHER; note = 2'-O-methyladenosine-3'-phosphate
  modified_base 15: mod_base = OTHER; note = 2'-O-methyluridine-3'-phosphate
  modified_base 16: mod_base = OTHER; note = 2'-O-methyladenosine-3'-phosphate
  modified_base 17: mod_base = OTHER; note = 2'-O-methyluridine-3'-phosphate
  modified_base 18: mod_base = OTHER; note = 2'-O-methyluridine-3'-phosphate
  modified_base 19: mod_base = OTHER; note = 2'-O-methyluridine-3'-phosphate
  modified_base 20: mod_base = OTHER; note = 2'-O-methoxyethyl(MOE) adenosine-3'-phosphate
  modified_base 21: mod_base = OTHER; note = 2'-O-methoxyethyl(MOE)-thymidine(or 5-methyluridine)-3'-phosphate-(N1-hydroxyethanol-N12[tris(N -acetylgalactosamine-triethyleneglycol)]-diamidodecane]
ttgtaacttgaagatatttat

SEQ ID NO: 932 - RNA, 21 nt, synthetic construct
  source 1..21: mol_type = other RNA
  modified_base 1: mod_base = OTHER; note = 2'-O-methoxyethyl(MOE) guanosine-3'-phosphorothioate
  modified_base 2: mod_base = OTHER; note = 2'-O-methoxyethyl(MOE)-thymidine(or 5-methyluridine)-3'- phosphorothioate
  modified_base 3: mod_base = OTHER; note = 2'-O-methyluridine-3'-phosphate
  modified_base 4: mod_base = OTHER; note = 2'-O-methyluridine-3'-phosphate
  modified_base 5: mod_base = OTHER; note = 2'-O-methyluridine-3'-phosphate
  modified_base 6: mod_base = OTHER; note = 2'-O-methylguanosine-3'-phosphate
  modified_base 7: mod_base = OTHER; note = 2'-fluorocytidine-3'-phosphate
  modified_base 8: mod_base = OTHER; note = 2'-O-methyluridine-3'-phosphate
  modified_base 9: mod_base = OTHER; note = 2'-fluorouridine-3'-phosphate
  modified_base 10: mod_base = OTHER; note = 2'-fluorouridine-3'-phosphate
  modified_base 11: mod_base = OTHER; note = 2'-fluorouridine-3'-phosphate
  modified_base 12: mod_base = OTHER; note = 2'-O-methylguanosine-3'-phosphate
  modified_base 13: mod_base = OTHER; note = 2'-O-methyluridine-3'-phosphate
  modified_base 14: mod_base = OTHER; note = 2'-O-methyladenosine-3'-phosphate
  modified_base 15: mod_base = OTHER; note = 2'-O-methyladenosine-3'-phosphate
  modified_base 16: mod_base = OTHER; note = 2'-O-methylcytidine-3'-phosphate
  modified_base 17: mod_base = OTHER; note = 2'-O-methyluridine-3'-phosphate
  modified_base 18: mod_base = OTHER; note = 2'-O-methyluridine-3'-phosphate
  modified_base 19: mod_base = OTHER; note = 2'-O-methylguanosine-3'-phosphate
  modified_base 20: mod_base = OTHER; note = 2'-O-methoxyethyl(MOE) adenosine-3'-phosphate
  modified_base 21: mod_base = OTHER; note = 2'-O-methoxyethyl(MOE) adenosine-3'-phosphate-(N1-hydroxyethanol-N12[tris(N-acetyl galactosamine-triethyleneglycol)]-diamidodecane]
gttttgcttttgtaacttgaa

SEQ ID NO: 933 - RNA, 21 nt, synthetic construct
  source 1..21: mol_type = other RNA
  modified_base 1: mod_base = OTHER; note = 2'-O-methoxyethyl(MOE)-thymidine(or 5-methyluridine)-3'- phosphorothioate
  modified_base 2: mod_base = OTHER; note = 2'-O-methoxyethyl(MOE)-thymidine(or 5-methyluridine)-3'- phosphorothioate
  modified_base 3: mod_base = OTHER; note = 2'-O-methyluridine-3'-phosphate
  modified_base 4: mod_base = OTHER; note = 2'-O-methyluridine-3'-phosphate
  modified_base 5: mod_base = OTHER; note = 2'-O-methylcytidine-3'-phosphate
  modified_base 6: mod_base = OTHER; note = 2'-O-methyluridine-3'-phosphate
  modified_base 7: mod_base = OTHER; note = 2'-O-methyladenosine-3'-phosphate
  modified_base 8: mod_base = OTHER; note = 2'-O-methylguanosine-3'-phosphate
  modified_base 9: mod_base = OTHER; note = 2'-fluoroadenosine-3'-phosphate
  modified_base 10: mod_base = OTHER; note = 2'-fluorocytidine-3'-phosphate
  modified_base 11: mod_base = OTHER; note = 2'-fluorocytidine-3'-phosphate
  modified_base 12: mod_base = OTHER; note = 2'-O-methyluridine-3'-phosphate
  modified_base 13: mod_base = OTHER; note = 2'-O-methylguanosine-3'-phosphate
  modified_base 14: mod_base = OTHER; note = 2'-O-methyluridine-3'-phosphate
  modified_base 15: mod_base = OTHER; note = 2'-O-methyluridine-3'-phosphate
  modified_base 16: mod_base = OTHER; note = 2'-O-methyluridine-3'-phosphate
  modified_base 17: mod_base = OTHER; note = 2'-O-methyluridine-3'-phosphate
  modified_base 18: mod_base = OTHER; note = 2'-O-methylguanosine-3'-phosphate
  modified_base 19: mod_base = OTHER; note = 2'-O-methylcytidine-3'-phosphorothioate
  modified_base 20: mod_base = OTHER; note = 2'-O-methoxyethyl(MOE)-thymidine(or 5-methyluridine)-3'- phosphorothioate
  modified_base 21: mod_base = OTHER; note = 2'-O-methoxyethyl(MOE)-thymidine(or 5-methyluridine)-3'-phosphate-(N1-hydroxyethanol-N12[tris(N -acetylgalactosamine-triethyleneglycol)]-diamidodecane]
ttttctagacctgttttgctt

SEQ ID NO: 934 - RNA, 21 nt, synthetic construct
  source 1..21: mol_type = other RNA
  modified_base 1: mod_base = OTHER; note = 2'-O-methoxyethyl(MOE) adenosine-3'-phosphorothioate
  modified_base 2: mod_base = OTHER; note = 2'-O-methoxyethyl(MOE) guanosine-3'-phosphorothioate
  modified_base 3: mod_base = OTHER; note = 2'-O-methyladenosine-3'-phosphate
  modified_base 4: mod_base = OTHER; note = 2'-O-methylcytidine-3'-phosphate
  modified_base 5: mod_base = OTHER; note = 2'-O-methylcytidine-3'-phosphate
  modified_base 6: mod_base = OTHER; note = 2'-O-methyluridine-3'-phosphate
  modified_base 7: mod_base = OTHER; note = 2'-fluoroguanosine-3'-phosphate
  modified_base 8: mod_base = OTHER; note = 2'-O-methyluridine-3'-phosphate
  modified_base 9: mod_base = OTHER; note = 2'-fluorouridine-3'-phosphate
  modified_base 10: mod_base = OTHER; note = 2'-fluorouridine-3'-phosphate
  modified_base 11: mod_base = OTHER; note = 2'-fluorouridine-3'-phosphate
  modified_base 12: mod_base = OTHER; note = 2'-O-methylguanosine-3'-phosphate
  modified_base 13: mod_base = OTHER; note = 2'-O-methylcytidine-3'-phosphate
  modified_base 14: mod_base = OTHER; note = 2'-O-methyluridine-3'-phosphate
  modified_base 15: mod_base = OTHER; note = 2'-O-methyluridine-3'-phosphate
  modified_base 16: mod_base = OTHER; note = 2'-O-methyluridine-3'-phosphate
  modified_base 17: mod_base = OTHER; note = 2'-O-methyluridine-3'-phosphate
  modified_base 18: mod_base = OTHER; note = 2'-O-methylguanosine-3'-phosphate
  modified_base 19: mod_base = OTHER; note = 2'-O-methyluridine-3'-phosphorothioate
  modified_base 20: mod_base = OTHER; note = 2'-O-methoxyethyl(MOE) adenosine-3'-phosphorothioate
  modified_base 21: mod_base = OTHER; note = 2'-O-methoxyethyl(MOE) adenosine-3'-phosphate-(N1-hydroxyethanol-N12[tris(N-acetyl galactosamine-triethyleneglycol)]-diamidodecane]
agacctgttttgcttttgtaa

SEQ ID NO: 935 - RNA, 21 nt, synthetic construct
  source 1..21: mol_type = other RNA
  modified_base 1: mod_base = OTHER; note = 2'-O-methoxyethyl(MOE)-thymidine(or 5-methyluridine)-3'- phosphorothioate
  modified_base 2: mod_base = OTHER; note = 2'-O-methoxyethyl(MOE)-thymidine(or 5-methyluridine)-3'- phosphorothioate
  modified_base 3: mod_base = OTHER; note = 2'-O-methylguanosine-3'-phosphate
  modified_base 4: mod_base = OTHER; note = 2'-O-methyluridine-3'-phosphate
  modified_base 5: mod_base = OTHER; note = 2'-O-methyladenosine-3'-phosphate
  modified_base 6: mod_base = OTHER; note = 2'-O-methyladenosine-3'-phosphate
  modified_base 7: mod_base = OTHER; note = 2'-O-methylcytidine-3'-phosphate
  modified_base 8: mod_base = OTHER; note = 2'-O-methyluridine-3'-phosphate
  modified_base 9: mod_base = OTHER; note = 2'-fluorouridine-3'-phosphate
  modified_base 10: mod_base = OTHER; note = 2'-fluoroguanosine-3'-phosphate
  modified_base 11: mod_base = OTHER; note = 2'-fluoroadenosine-3'-phosphate
  modified_base 12: mod_base = OTHER; note = 2'-O-methyladenosine-3'-phosphate
  modified_base 13: mod_base = OTHER; note = 2'-O-methylguanosine-3'-phosphate
  modified_base 14: mod_base = OTHER; note = 2'-O-methyladenosine-3'-phosphate
  modified_base 15: mod_base = OTHER; note = 2'-O-methyluridine-3'-phosphate
  modified_base 16: mod_base = OTHER; note = 2'-O-methyladenosine-3'-phosphate
  modified_base 17: mod_base = OTHER; note = 2'-O-methyluridine-3'-phosphate
  modified_base 18: mod_base = OTHER; note = 2'-O-methyluridine-3'-phosphate
  modified_base 19: mod_base = OTHER; note = 2'-O-methyluridine-3'-phosphorothioate
  modified_base 20: mod_base = OTHER; note = 2'-O-methoxyethyl(MOE) adenosine-3'-phosphorothioate
  modified_base 21: mod_base = OTHER; note = 2'-O-methoxyethyl(MOE)-thymidine(or 5-methyluridine)-3'-phosphate-(N1-hydroxyethanol-N12[tris(N -acetylgalactosamine-triethyleneglycol)]-diamidodecane]
ttgtaacttgaagatatttat

SEQ ID NO: 936 - RNA, 21 nt, synthetic construct
  source 1..21: mol_type = other RNA
  modified_base 1: mod_base = OTHER; note = 2'-O-methoxyethyl(MOE) guanosine-3'-phosphorothioate
  modified_base 2: mod_base = OTHER; note = 2'-O-methoxyethyl(MOE)-thymidine(or 5-methyluridine)-3'- phosphorothioate
  modified_base 3: mod_base = OTHER; note = 2'-O-methyluridine-3'-phosphate
  modified_base 4: mod_base = OTHER; note = 2'-O-methyluridine-3'-phosphate
  modified_base 5: mod_base = OTHER; note = 2'-O-methyluridine-3'-phosphate
  modified_base 6: mod_base = OTHER; note = 2'-O-methylguanosine-3'-phosphate
  modified_base 7: mod_base = OTHER; note = 2'-fluorocytidine-3'-phosphate
  modified_base 8: mod_base = OTHER; note = 2'-O-methyluridine-3'-phosphate
  modified_base 9: mod_base = OTHER; note = 2'-fluorouridine-3'-phosphate
  modified_base 10: mod_base = OTHER; note = 2'-fluorouridine-3'-phosphate
  modified_base 11: mod_base = OTHER; note = 2'-fluorouridine-3'-phosphate
  modified_base 12: mod_base = OTHER; note = 2'-O-methylguanosine-3'-phosphate
  modified_base 13: mod_base = OTHER; note = 2'-O-methyluridine-3'-phosphate
  modified_base 14: mod_base = OTHER; note = 2'-O-methyladenosine-3'-phosphate
  modified_base 15: mod_base = OTHER; note = 2'-O-methyladenosine-3'-phosphate
  modified_base 16: mod_base = OTHER; note = 2'-O-methylcytidine-3'-phosphate
  modified_base 17: mod_base = OTHER; note = 2'-O-methyluridine-3'-phosphate
  modified_base 18: mod_base = OTHER; note = 2'-O-methyluridine-3'-phosphate
  modified_base 19: mod_base = OTHER; note = 2'-O-methylguanosine-3'-phosphorothioate
  modified_base 20: mod_base = OTHER; note = 2'-O-methoxyethyl(MOE) adenosine-3'-phosphorothioate
  modified_base 21: mod_base = OTHER; note = 2'-O-methoxyethyl(MOE) adenosine-3'-phosphate-(N1-hydroxyethanol-N12[tris(N-acetyl galactosamine-triethyleneglycol)]-diamidodecane]
gttttgcttttgtaacttgaa

SEQ ID NO: 937 - RNA, 21 nt, synthetic construct
  source 1..21: mol_type = other RNA
  modified_base 1: mod_base = OTHER; note = 2'-O-methoxyethyl(MOE) guanosine-3'-phosphorothioate
  modified_base 2: mod_base = OTHER; note = 2'-O-methoxyethyl(MOE)-thymidine(or 5-methyluridine)-3'- phosphorothioate
  modified_base 3: mod_base = OTHER; note = 2'-O-methyluridine-3'-phosphate
  modified_base 4: mod_base = OTHER; note = 2'-O-methyluridine-3'-phosphate
  modified_base 5: mod_base = OTHER; note = 2'-O-methyluridine-3'-phosphate
  modified_base 6: mod_base = OTHER; note = 2'-O-methylguanosine-3'-phosphate
  modified_base 7: mod_base = OTHER; note = 2'-fluorocytidine-3'-phosphate
  modified_base 8: mod_base = OTHER; note = 2'-O-methyluridine-3'-phosphate
  modified_base 9: mod_base = OTHER; note = 2'-fluorouridine-3'-phosphate
  modified_base 10: mod_base = OTHER; note = 2'-fluorouridine-3'-phosphate
  modified_base 11: mod_base = OTHER; note = 2'-fluorouridine-3'-phosphate
  modified_base 12: mod_base = OTHER; note = 2'-O-methylguanosine-3'-phosphate
  modified_base 13: mod_base = OTHER; note = 2'-O-methyluridine-3'-phosphate
  modified_base 14: mod_base = OTHER; note = 2'-O-methyladenosine-3'-phosphate
  modified_base 15: mod_base = OTHER; note = 2'-O-methyladenosine-3'-phosphate
  modified_base 16: mod_base = OTHER; note = 2'-O-methylcytidine-3'-phosphate
  modified_base 17: mod_base = OTHER; note = 2'-O-methyluridine-3'-phosphate
  modified_base 18: mod_base = OTHER; note = 2'-O-methyluridine-3'-phosphate
  modified_base 19: mod_base = OTHER; note = 2'-O-methylguanosine-3'-phosphorothioate
  modified_base 20: mod_base = OTHER; note = 2'-O-methoxyethyl(MOE) adenosine-3'-phosphorothioate
  modified_base 21: mod_base = OTHER; note = 2'-O-methoxyethyl(MOE) adenosine-3'-phosphate-(N1-hydroxyethanol-N12[tris(N-acetyl galactosamine-triethyleneglycol)]-diamidodecane]
gttttgcttttgtaacttgaa

SEQ ID NO: 938 - RNA, 21 nt, synthetic construct
  source 1..21: mol_type = other RNA
  modified_base 1: mod_base = OTHER; note = 2'-O-methoxyethyl(MOE) guanosine-3'-phosphorothioate
  modified_base 2: mod_base = OTHER; note = 2'-O-methoxyethyl(MOE)-thymidine(or 5-methyluridine)-3'- phosphorothioate
  modified_base 3: mod_base = OTHER; note = 2'-O-methyluridine-3'-phosphate
  modified_base 4: mod_base = OTHER; note = 2'-O-methyluridine-3'-phosphate
  modified_base 5: mod_base = OTHER; note = 2'-O-methyluridine-3'-phosphate
  modified_base 6: mod_base = OTHER; note = 2'-O-methylguanosine-3'-phosphate
  modified_base 7: mod_base = OTHER; note = 2'-fluorocytidine-3'-phosphate
  modified_base 8: mod_base = OTHER; note = 2'-O-methyluridine-3'-phosphate
  modified_base 9: mod_base = OTHER; note = 2'-fluorouridine-3'-phosphate
  modified_base 10: mod_base = OTHER; note = 2'-fluorouridine-3'-phosphate
  modified_base 11: mod_base = OTHER; note = 2'-fluorouridine-3'-phosphate
  modified_base 12: mod_base = OTHER; note = 2'-O-methylguanosine-3'-phosphate
  modified_base 13: mod_base = OTHER; note = 2'-O-methyluridine-3'-phosphate
  modified_base 14: mod_base = OTHER; note = 2'-O-methyladenosine-3'-phosphate
  modified_base 15: mod_base = OTHER; note = 2'-O-methyladenosine-3'-phosphate
  modified_base 16: mod_base = OTHER; note = 2'-O-methylcytidine-3'-phosphate
  modified_base 17: mod_base = OTHER; note = 2'-O-methyluridine-3'-phosphate
  modified_base 18: mod_base = OTHER; note = 2'-O-methyluridine-3'-phosphate
  modified_base 19: mod_base = OTHER; note = 2'-O-methylguanosine-3'-phosphorothioate
  modified_base 20: mod_base = OTHER; note = 2'-O-methoxyethyl(MOE) adenosine-3'-phosphorothioate
  modified_base 21: mod_base = OTHER; note = 2'-O-methoxyethyl(MOE) adenosine-3'-phosphate-(N1-hydroxyethanol-N12[tris(N-acetyl galactosamine-triethyleneglycol)]-diamidodecane]
gttttgcttttgtaacttgaa

SEQ ID NO: 939 - RNA, 21 nt, synthetic construct
  source 1..21: mol_type = other RNA
  modified_base 1: mod_base = OTHER; note = 2'-O-methoxyethyl(MOE) guanosine-3'-phosphorothioate
  modified_base 2: mod_base = OTHER; note = 2'-O-methoxyethyl(MOE)-thymidine(or 5-methyluridine)-3'- phosphorothioate
  modified_base 3: mod_base = OTHER; note = 2'-O-methyluridine-3'-phosphate
  modified_base 4: mod_base = OTHER; note = 2'-O-methyluridine-3'-phosphate
  modified_base 5: mod_base = OTHER; note = 2'-O-methyluridine-3'-phosphate
  modified_base 6: mod_base = OTHER; note = 2'-O-methylguanosine-3'-phosphate
  modified_base 7: mod_base = OTHER; note = 2'-fluorocytidine-3'-phosphate
  modified_base 8: mod_base = OTHER; note = 2'-O-methyluridine-3'-phosphate
  modified_base 9: mod_base = OTHER; note = 2'-fluorouridine-3'-phosphate
  modified_base 10: mod_base = OTHER; note = 2'-fluorouridine-3'-phosphate
  modified_base 11: mod_base = OTHER; note = 2'-fluorouridine-3'-phosphate
  modified_base 12: mod_base = OTHER; note = 2'-O-methylguanosine-3'-phosphate
  modified_base 13: mod_base = OTHER; note = 2'-O-methyluridine-3'-phosphate
  modified_base 14: mod_base = OTHER; note = 2'-O-methyladenosine-3'-phosphate
  modified_base 15: mod_base = OTHER; note = 2'-O-methyladenosine-3'-phosphate
  modified_base 16: mod_base = OTHER; note = 2'-O-methylcytidine-3'-phosphate
  modified_base 17: mod_base = OTHER; note = 2'-O-methyluridine-3'-phosphate
  modified_base 18: mod_base = OTHER; note = 2'-O-methyluridine-3'-phosphate
  modified_base 19: mod_base = OTHER; note = 2'-O-methylguanosine-3'-phosphorothioate
  modified_base 20: mod_base = OTHER; note = 2'-O-methoxyethyl(MOE) adenosine-3'-phosphorothioate
  modified_base 21: mod_base = OTHER; note = 2'-O-methoxyethyl(MOE) adenosine-3'-phosphate-(N1-hydroxyethanol-N12[tris(N-acetyl galactosamine-triethyleneglycol)]-diamidodecane]
gttttgcttttgtaacttgaa

SEQ ID NO: 940 - RNA, 21 nt, synthetic construct
  source 1..21: mol_type = other RNA
  modified_base 1: mod_base = OTHER; note = 2'-O-methoxyethyl(MOE) guanosine-3'-phosphorothioate
  modified_base 2: mod_base = OTHER; note = 2'-O-methoxyethyl(MOE)-thymidine(or 5-methyluridine)-3'- phosphorothioate
  modified_base 3: mod_base = OTHER; note = 2'-O-methyluridine-3'-phosphate
  modified_base 4: mod_base = OTHER; note = 2'-O-methyluridine-3'-phosphate
  modified_base 5: mod_base = OTHER; note = 2'-O-methyluridine-3'-phosphate
  modified_base 6: mod_base = OTHER; note = 2'-O-methylguanosine-3'-phosphate
  modified_base 7: mod_base = OTHER; note = 2'-fluorocytidine-3'-phosphate
  modified_base 8: mod_base = OTHER; note = 2'-O-methyluridine-3'-phosphate
  modified_base 9: mod_base = OTHER; note = 2'-fluorouridine-3'-phosphate
  modified_base 10: mod_base = OTHER; note = 2'-fluorouridine-3'-phosphate
  modified_base 11: mod_base = OTHER; note = 2'-fluorouridine-3'-phosphate
  modified_base 12: mod_base = OTHER; note = 2'-O-methylguanosine-3'-phosphate
  modified_base 13: mod_base = OTHER; note = 2'-O-methyluridine-3'-phosphate
  modified_base 14: mod_base = OTHER; note = 2'-O-methyladenosine-3'-phosphate
  modified_base 15: mod_base = OTHER; note = 2'-O-methyladenosine-3'-phosphate
  modified_base 16: mod_base = OTHER; note = 2'-O-methylcytidine-3'-phosphate
  modified_base 17: mod_base = OTHER; note = 2'-O-methyluridine-3'-phosphate
  modified_base 18: mod_base = OTHER; note = 2'-O-methyluridine-3'-phosphate
  modified_base 19: mod_base = OTHER; note = 2'-O-methylguanosine-3'-phosphorothioate
  modified_base 20: mod_base = OTHER; note = 2'-O-methoxyethyl(MOE) adenosine-3'-phosphorothioate
  modified_base 21: mod_base = OTHER; note = 2'-O-methoxyethyl(MOE) adenosine-3'-phosphate-(N1-hydroxyethanol-N12[tris(N-acetyl galactosamine-triethyleneglycol)]-diamidodecane]
gttttgcttttgtaacttgaa

SEQ ID NO: 941 - RNA, 21 nt, synthetic construct
  source 1..21: mol_type = other RNA
  modified_base 1: mod_base = OTHER; note = 2'-O-methoxyethyl(MOE) guanosine-3'-phosphorothioate
  modified_base 2: mod_base = OTHER; note = 2'-O-methoxyethyl(MOE)-thymidine(or 5-methyluridine)-3'- phosphorothioate
  modified_base 3: mod_base = OTHER; note = 2'-O-methyluridine-3'-phosphate
  modified_base 4: mod_base = OTHER; note = 2'-O-methyluridine-3'-phosphate
  modified_base 5: mod_base = OTHER; note = 2'-O-methyluridine-3'-phosphate
  modified_base 6: mod_base = OTHER; note = 2'-O-methylguanosine-3'-phosphate
  modified_base 7: mod_base = OTHER; note = 2'-fluorocytidine-3'-phosphate
  modified_base 8: mod_base = OTHER; note = 2'-O-methyluridine-3'-phosphate
  modified_base 9: mod_base = OTHER; note = 2'-fluorouridine-3'-phosphate
  modified_base 10: mod_base = OTHER; note = 2'-fluorouridine-3'-phosphate
  modified_base 11: mod_base = OTHER; note = 2'-fluorouridine-3'-phosphate
  modified_base 12: mod_base = OTHER; note = 2'-O-methylguanosine-3'-phosphate
  modified_base 13: mod_base = OTHER; note = 2'-O-methyluridine-3'-phosphate
  modified_base 14: mod_base = OTHER; note = 2'-O-methyladenosine-3'-phosphate
  modified_base 15: mod_base = OTHER; note = 2'-O-methyladenosine-3'-phosphate
  modified_base 16: mod_base = OTHER; note = 2'-O-methylcytidine-3'-phosphate
  modified_base 17: mod_base = OTHER; note = 2'-O-methyluridine-3'-phosphate
  modified_base 18: mod_base = OTHER; note = 2'-O-methyluridine-3'-phosphate
  modified_base 19: mod_base = OTHER; note = 2'-O-methylguanosine-3'-phosphorothioate
  modified_base 20: mod_base = OTHER; note = 2'-O-methoxyethyl(MOE) adenosine-3'-phosphorothioate
  modified_base 21: mod_base = OTHER; note = 2'-O-methoxyethyl(MOE) adenosine-3'-phosphate-(N1-hydroxyethanol-N12[tris(N-acetyl galactosamine-triethyleneglycol)]-diamidodecane]
gttttgcttttgtaacttgaa

SEQ ID NO: 942 - RNA, 21 nt, synthetic construct
  source 1..21: mol_type = other RNA
  modified_base 1: mod_base = OTHER; note = 2'-O-methoxyethyl(MOE) guanosine-3'-phosphorothioate
  modified_base 2: mod_base = OTHER; note = 2'-O-methoxyethyl(MOE)-thymidine(or 5-methyluridine)-3'- phosphorothioate
  modified_base 3: mod_base = OTHER; note = 2'-O-methyluridine-3'-phosphate
  modified_base 4: mod_base = OTHER; note = 2'-O-methyluridine-3'-phosphate
  modified_base 5: mod_base = OTHER; note = 2'-O-methyluridine-3'-phosphate
  modified_base 6: mod_base = OTHER; note = 2'-O-methylguanosine-3'-phosphate
  modified_base 7: mod_base = OTHER; note = 2'-fluorocytidine-3'-phosphate
  modified_base 8: mod_base = OTHER; note = 2'-O-methyluridine-3'-phosphate
  modified_base 9: mod_base = OTHER; note = 2'-fluorouridine-3'-phosphate
  modified_base 10: mod_base = OTHER; note = 2'-fluorouridine-3'-phosphate
  modified_base 11: mod_base = OTHER; note = 2'-fluorouridine-3'-phosphate
  modified_base 12: mod_base = OTHER; note = 2'-O-methylguanosine-3'-phosphate
  modified_base 13: mod_base = OTHER; note = 2'-O-methyluridine-3'-phosphate
  modified_base 14: mod_base = OTHER; note = 2'-O-methyladenosine-3'-phosphate
  modified_base 15: mod_base = OTHER; note = 2'-O-methyladenosine-3'-phosphate
  modified_base 16: mod_base = OTHER; note = 2'-O-methylcytidine-3'-phosphate
  modified_base 17: mod_base = OTHER; note = 2'-O-methyluridine-3'-phosphate
  modified_base 18: mod_base = OTHER; note = 2'-O-methyluridine-3'-phosphate
  modified_base 19: mod_base = OTHER; note = 2'-O-methylguanosine-3'-phosphorothioate
  modified_base 20: mod_base = OTHER; note = 2'-O-methoxyethyl(MOE) adenosine-3'-phosphorothioate
  modified_base 21: mod_base = OTHER; note = 2'-O-methoxyethyl(MOE) adenosine-3'-phosphate-(N1-hydroxyethanol-N12[tris(N-acetyl galactosamine-triethyleneglycol)]-diamidodecane]
gttttgcttttgtaacttgaa

SEQ ID NO: 943 - RNA, 21 nt, synthetic construct
  source 1..21: mol_type = other RNA
  modified_base 1: mod_base = OTHER; note = 2'-O-methoxyethyl(MOE) guanosine-3'-phosphorothioate
  modified_base 2: mod_base = OTHER; note = 2'-O-methoxyethyl(MOE)-thymidine(or 5-methyluridine)-3'- phosphorothioate
  modified_base 3: mod_base = OTHER; note = 2'-O-methyluridine-3'-phosphate
  modified_base 4: mod_base = OTHER; note = 2'-O-methyluridine-3'-phosphate
  modified_base 5: mod_base = OTHER; note = 2'-O-methyluridine-3'-phosphate
  modified_base 6: mod_base = OTHER; note = 2'-O-methylguanosine-3'-phosphate
  modified_base 7: mod_base = OTHER; note = 2'-fluorocytidine-3'-phosphate
  modified_base 8: mod_base = OTHER; note = 2'-O-methyluridine-3'-phosphate
  modified_base 9: mod_base = OTHER; note = 2'-fluorouridine-3'-phosphate
  modified_base 10: mod_base = OTHER; note = 2'-fluorouridine-3'-phosphate
  modified_base 11: mod_base = OTHER; note = 2'-fluorouridine-3'-phosphate
  modified_base 12: mod_base = OTHER; note = 2'-O-methylguanosine-3'-phosphate
  modified_base 13: mod_base = OTHER; note = 2'-O-methyluridine-3'-phosphate
  modified_base 14: mod_base = OTHER; note = 2'-O-methyladenosine-3'-phosphate
  modified_base 15: mod_base = OTHER; note = 2'-O-methyladenosine-3'-phosphate
  modified_base 16: mod_base = OTHER; note = 2'-O-methylcytidine-3'-phosphate
  modified_base 17: mod_base = OTHER; note = 2'-O-methyluridine-3'-phosphate
  modified_base 18: mod_base = OTHER; note = 2'-O-methyluridine-3'-phosphate
  modified_base 19: mod_base = OTHER; note = 2'-O-methylguanosine-3'-phosphorothioate
  modified_base 20: mod_base = OTHER; note = 2'-O-methoxyethyl(MOE) adenosine-3'-phosphorothioate
  modified_base 21: mod_base = OTHER; note = 2'-O-methoxyethyl(MOE) adenosine-3'-phosphate-(N1-hydroxyethanol-N12[tris(N-acetyl galactosamine-triethyleneglycol)]-diamidodecane]
gttttgcttttgtaacttgaa

SEQ ID NO: 944 - RNA, 21 nt, synthetic construct
  source 1..21: mol_type = other RNA
  modified_base 1: mod_base = OTHER; note = 2'-O-methoxyethyl(MOE) guanosine-3'-phosphorothioate
  modified_base 2: mod_base = OTHER; note = 2'-O-methoxyethyl(MOE)-thymidine(or 5-methyluridine)-3'- phosphorothioate
  modified_base 3: mod_base = OTHER; note = 2'-O-methyluridine-3'-phosphate
  modified_base 4: mod_base = OTHER; note = 2'-O-methyluridine-3'-phosphate
  modified_base 5: mod_base = OTHER; note = 2'-O-methyluridine-3'-phosphate
  modified_base 6: mod_base = OTHER; note = 2'-O-methylguanosine-3'-phosphate
  modified_base 7: mod_base = OTHER; note = 2'-fluorocytidine-3'-phosphate
  modified_base 8: mod_base = OTHER; note = 2'-O-methyluridine-3'-phosphate
  modified_base 9: mod_base = OTHER; note = 2'-fluorouridine-3'-phosphate
  modified_base 10: mod_base = OTHER; note = 2'-fluorouridine-3'-phosphate
  modified_base 11: mod_base = OTHER; note = 2'-fluorouridine-3'-phosphate
  modified_base 12: mod_base = OTHER; note = 2'-O-methylguanosine-3'-phosphate
  modified_base 13: mod_base = OTHER; note = 2'-O-methyluridine-3'-phosphate
  modified_base 14: mod_base = OTHER; note = 2'-O-methyladenosine-3'-phosphate
  modified_base 15: mod_base = OTHER; note = 2'-O-methyladenosine-3'-phosphate
  modified_base 16: mod_base = OTHER; note = 2'-O-methylcytidine-3'-phosphate
  modified_base 17: mod_base = OTHER; note = 2'-O-methyluridine-3'-phosphate
  modified_base 18: mod_base = OTHER; note = 2'-O-methyluridine-3'-phosphate
  modified_base 19: mod_base = OTHER; note = 2'-O-methylguanosine-3'-phosphorothioate
  modified_base 20: mod_base = OTHER; note = 2'-O-methoxyethyl(MOE) adenosine-3'-phosphorothioate
  modified_base 21: mod_base = OTHER; note = 2'-O-methoxyethyl(MOE) adenosine-3'-phosphate-(N1-hydroxyethanol-N12[tris(N-acetyl galactosamine-triethyleneglycol)]-diamidodecane]
gttttgcttttgtaacttgaa

SEQ ID NO: 945 - RNA, 21 nt, synthetic construct
  source 1..21: mol_type = other RNA
  modified_base 1: mod_base = OTHER; note = 2'-O-methoxyethyl(MOE) guanosine-3'-phosphorothioate
  modified_base 2: mod_base = OTHER; note = 2'-O-methoxyethyl(MOE)-thymidine(or 5-methyluridine)-3'- phosphorothioate
  modified_base 3: mod_base = OTHER; note = 2'-O-methyluridine-3'-phosphate
  modified_base 4: mod_base = OTHER; note = 2'-O-methyluridine-3'-phosphate
  modified_base 5: mod_base = OTHER; note = 2'-O-methyluridine-3'-phosphate
  modified_base 6: mod_base = OTHER; note = 2'-O-methylguanosine-3'-phosphate
  modified_base 7: mod_base = OTHER; note = 2'-fluorocytidine-3'-phosphate
  modified_base 8: mod_base = OTHER; note = 2'-O-methyluridine-3'-phosphate
  modified_base 9: mod_base = OTHER; note = 2'-fluorouridine-3'-phosphate
  modified_base 10: mod_base = OTHER; note = 2'-fluorouridine-3'-phosphate
  modified_base 11: mod_base = OTHER; note = 2'-fluorouridine-3'-phosphate
  modified_base 12: mod_base = OTHER; note = 2'-O-methylguanosine-3'-phosphate
  modified_base 13: mod_base = OTHER; note = 2'-O-methyluridine-3'-phosphate
  modified_base 14: mod_base = OTHER; note = 2'-O-methyladenosine-3'-phosphate
  modified_base 15: mod_base = OTHER; note = 2'-O-methyladenosine-3'-phosphate
  modified_base 16: mod_base = OTHER; note = 2'-O-methylcytidine-3'-phosphate
  modified_base 17: mod_base = OTHER; note = 2'-O-methyluridine-3'-phosphate
  modified_base 18: mod_base = OTHER; note = 2'-O-methyluridine-3'-phosphate
  modified_base 19: mod_base = OTHER; note = 2'-O-methylguanosine-3'-phosphorothioate
  modified_base 20: mod_base = OTHER; note = 2'-O-methoxyethyl(MOE) adenosine-3'-phosphorothioate
  modified_base 21: mod_base = OTHER; note = 2'-O-methoxyethyl(MOE) adenosine-3'-phosphate-(N1-hydroxyethanol-N12[tris(N-acetyl galactosamine-triethyleneglycol)]-diamidodecane]
gttttgcttttgtaacttgaa

SEQ ID NO: 946 - RNA, 21 nt, synthetic construct
  source 1..21: mol_type = other RNA
  modified_base 1: mod_base = OTHER; note = 2'-O-methoxyethyl(MOE) guanosine-3'-phosphorothioate
  modified_base 2: mod_base = OTHER; note = 2'-O-methoxyethyl(MOE)-thymidine(or 5-methyluridine)-3'- phosphorothioate
  modified_base 3: mod_base = OTHER; note = 2'-O-methyluridine-3'-phosphate
  modified_base 4: mod_base = OTHER; note = 2'-O-methyluridine-3'-phosphate
  modified_base 5: mod_base = OTHER; note = 2'-O-methyluridine-3'-phosphate
  modified_base 6: mod_base = OTHER; note = 2'-O-methylguanosine-3'-phosphate
  modified_base 7: mod_base = OTHER; note = 2'-fluorocytidine-3'-phosphate
  modified_base 8: mod_base = OTHER; note = 2'-O-methyluridine-3'-phosphate
  modified_base 9: mod_base = OTHER; note = 2'-fluorouridine-3'-phosphate
  modified_base 10: mod_base = OTHER; note = 2'-fluorouridine-3'-phosphate
  modified_base 11: mod_base = OTHER; note = 2'-fluorouridine-3'-phosphate
  modified_base 12: mod_base = OTHER; note = 2'-O-methylguanosine-3'-phosphate
  modified_base 13: mod_base = OTHER; note = 2'-O-methyluridine-3'-phosphate
  modified_base 14: mod_base = OTHER; note = 2'-O-methyladenosine-3'-phosphate
  modified_base 15: mod_base = OTHER; note = 2'-O-methyladenosine-3'-phosphate
  modified_base 16: mod_base = OTHER; note = 2'-O-methylcytidine-3'-phosphate
  modified_base 17: mod_base = OTHER; note = 2'-O-methyluridine-3'-phosphate
  modified_base 18: mod_base = OTHER; note = 2'-O-methyluridine-3'-phosphate
  modified_base 19: mod_base = OTHER; note = 2'-O-methyladenosine-3'-phosphorothioate
  modified_base 20: mod_base = OTHER; note = 2'-O-methoxyethyl(MOE) adenosine-3'-phosphorothioate
  modified_base 21: mod_base = OTHER; note = 2'-O-methoxyethyl(MOE) adenosine-3'-phosphate-(N1-hydroxyethanol-N12[tris(N-acetyl galactosamine-triethyleneglycol)]-diamidodecane]
gttttgcttttgtaacttaaa

SEQ ID NO: 947 - DNA, 21 bp, synthetic construct
  source 1..21: mol_type = other DNA
  modified_base 1: mod_base = OTHER; note 2'-O-methoxyethyl(MOE)-5-methylcytidine-3'-phosphorothioate
  modified_base 2: mod_base = OTHER; note = 2'-O-methoxyethyl(MOE)-thymidine(or 5-methyluridine)-3'- phosphorothioate
  modified_base 3: mod_base = OTHER; note = 2'-O-methyladenosine-3'-phosphate
  modified_base 4: mod_base = OTHER; note = 2'-O-methylguanosine-3'-phosphate
  modified_base 5: mod_base = OTHER; note = 2'-O-methyladenosine-3'-phosphate
  modified_base 6: mod_base = OTHER; note = 2'-O-methylcytidine-3'-phosphate
  modified_base 7: mod_base = OTHER; note = 2'-fluorocytidine-3'-phosphate
  modified_base 8: mod_base = OTHER; note = 2'-O-methyluridine-3'-phosphate
  modified_base 9: mod_base = OTHER; note = 2'-fluoroguanosine-3'-phosphate
  modified_base 10: mod_base = OTHER; note = 2'-fluorouridine-3'-phosphate
  modified_base 12: mod_base = OTHER; note = 2'-O-methyluridine-3'-phosphate
  modified_base 13: mod_base = OTHER; note = 2'-O-methyluridine-3'-phosphate
  modified_base 14: mod_base = OTHER; note = 2'-O-methylguanosine-3'-phosphate
  modified_base 15: mod_base = OTHER; note = 2'-O-methylcytidine-3'-phosphate
  modified_base 16: mod_base = OTHER; note = 2'-O-methyluridine-3'-phosphate
  modified_base 17: mod_base = OTHER; note = 2'-O-methyluridine-3'-phosphate
  modified_base 18: mod_base = OTHER; note = 2'-O-methyluridine-3'-phosphate
  modified_base 19: mod_base = OTHER; note = 2'-O-methyluridine-3'-phosphorothioate
  modified_base 20: mod_base = OTHER; note = 2'-O-methoxyethyl(MOE) guanosine-3'-phosphorothioate
  modified_base 21: mod_base = OTHER; note = 2'-O-methoxyethyl(MOE)-thymidine(or 5-methyluridine)-3'-phosphate-N-[tris(N-acetylgalactosamine -alkyl)-amidodecanoyl)]-4-hydroxyprolinol (Hyp-(N-acetylgalactosamine-alkyl)3)
  misc_feature 1..10: note = RNA
  misc_feature 11: note = DNA
  misc_feature 12..21: note = RNA
ctagacctgttttgcttttgt

SEQ ID NO: 948 - DNA, 21 bp, synthetic construct
  source 1..21: mol_type = other DNA
  modified_base 1: mod_base = OTHER; note 2'-O-methoxyethyl(MOE)-5-methylcytidine-3'-phosphorothioate
  modified_base 2: mod_base = OTHER; note = 2'-O-methoxyethyl(MOE)-thymidine(or 5-methyluridine)-3'- phosphorothioate
  modified_base 3: mod_base = OTHER; note = 2'-O-methyladenosine-3'-phosphate
  modified_base 4: mod_base = OTHER; note = 2'-O-methylguanosine-3'-phosphate
  modified_base 5: mod_base = OTHER; note = 2'-O-methyladenosine-3'-phosphate
  modified_base 6: mod_base = OTHER; note = 2'-O-methylcytidine-3'-phosphate
  modified_base 7: mod_base = OTHER; note = 2'-fluorocytidine-3'-phosphate
  modified_base 8: mod_base = OTHER; note = 2'-O-methyluridine-3'-phosphate
  modified_base 9: mod_base = OTHER; note = 2'-fluoroguanosine-3'-phosphate
  modified_base 10: mod_base = OTHER; note = 2'-fluorouridine-3'-phosphate
  modified_base 12: mod_base = OTHER; note = 2'-O-methyluridine-3'-phosphate
  modified_base 13: mod_base = OTHER; note = 2'-O-methyluridine-3'-phosphate
  modified_base 14: mod_base = OTHER; note = 2'-O-methylguanosine-3'-phosphate
  modified_base 15: mod_base = OTHER; note = 2'-O-methylcytidine-3'-phosphate
  modified_base 16: mod_base = OTHER; note = 2'-O-methyluridine-3'-phosphate
  modified_base 17: mod_base = OTHER; note = 2'-O-methyluridine-3'-phosphate
  modified_base 18: mod_base = OTHER; note = 2'-O-methyluridine-3'-phosphate
  modified_base 19: mod_base = OTHER; note = 2'-O-methyluridine-3'-phosphorothioate
  modified_base 20: mod_base = OTHER; note = 2'-O-methoxyethyl(MOE) guanosine-3'-phosphorothioate
  modified_base 21: mod_base = OTHER; note = 2'-O-methoxyethyl(MOE)-thymidine(or 5-methyluridine)-3'-phosphate-N-[tris(N-acetylgalactosamine -alkyl)-amidodecanoyl)]-4-hydroxyprolinol (Hyp-(N-acetylgalactosamine-alkyl)3)
  misc_feature 1..10: note = RNA
  misc_feature 11: note = DNA
  misc_feature 12..21: note = RNA
ctagacctgttttgcttttgt

SEQ ID NO: 949 - DNA, 21 bp, synthetic construct
  source 1..21: mol_type = other DNA
  modified_base 1: mod_base = OTHER; note = Cytosine threose nucleic acid-2'-phosphorothioate
  modified_base 2: mod_base = OTHER; note = Uracil threose nucleic acid-2'-phosphorothioate
  modified_base 3: mod_base = OTHER; note = 2'-O-methyladenosine-3'-phosphate
  modified_base 4: mod_base = OTHER; note = 2'-O-methylguanosine-3'-phosphate
  modified_base 5: mod_base = OTHER; note = 2'-O-methyladenosine-3'-phosphate
  modified_base 6: mod_base = OTHER; note = 2'-O-methylcytidine-3'-phosphate
  modified_base 7: mod_base = OTHER; note = 2'-fluorocytidine-3'-phosphate
  modified_base 8: mod_base = OTHER; note = 2'-O-methyluridine-3'-phosphate
  modified_base 9: mod_base = OTHER; note = 2'-fluoroguanosine-3'-phosphate
  modified_base 10: mod_base = OTHER; note = 2'-fluorouridine-3'-phosphate
  modified_base 12: mod_base = OTHER; note = 2'-O-methyluridine-3'-phosphate
  modified_base 13: mod_base = OTHER; note = 2'-O-methyluridine-3'-phosphate
  modified_base 14: mod_base = OTHER; note = 2'-O-methylguanosine-3'-phosphate
  modified_base 15: mod_base = OTHER; note = 2'-O-methylcytidine-3'-phosphate
  modified_base 16: mod_base = OTHER; note = 2'-O-methyluridine-3'-phosphate
  modified_base 17: mod_base = OTHER; note = 2'-O-methyluridine-3'-phosphate
  modified_base 18: mod_base = OTHER; note = 2'-O-methyluridine-3'-phosphate
  modified_base 19: mod_base = OTHER; note = 2'-O-methyluridine-3'-phosphorothioate
  modified_base 20: mod_base = OTHER; note = Guanine threose nucleic acid-2'-phosphorothioate
  modified_base 21: mod_base = OTHER; note = Uracil threose nucleic acid-2'-phosphate-N-[tris(N-acetylgalactosamine-alkyl)-amid odecanoyl)]-4-hydroxyprolinol (Hyp-(N-acetylgalactosamine-alkyl)3)
  misc_feature 1..10: note = RNA
  misc_feature 11: note = DNA
  misc_feature 12..21: note = RNA
ctagacctgttttgcttttgt

SEQ ID NO: 950 - RNA, 21 nt, synthetic construct
  source 1..21: mol_type = other RNA
  modified_base 1: mod_base = OTHER; note = 2'-O-methoxyethyl(MOE) guanosine-3'-phosphorothioate
  modified_base 2: mod_base = OTHER; note = 2'-O-methoxyethyl(MOE)-thymidine(or 5-methyluridine)-3'- phosphorothioate
  modified_base 3: mod_base = OTHER; note = 2'-O-methyluridine-3'-phosphate
  modified_base 4: mod_base = OTHER; note = 2'-O-methyluridine-3'-phosphate
  modified_base 5: mod_base = OTHER; note = 2'-O-methyluridine-3'-phosphate
  modified_base 6: mod_base = OTHER; note = 2'-O-methylguanosine-3'-phosphate
  modified_base 7: mod_base = OTHER; note = 2'-fluorocytidine-3'-phosphate
  modified_base 8: mod_base = OTHER; note = 2'-O-methyluridine-3'-phosphate
  modified_base 9: mod_base = OTHER; note = 2'-fluorouridine-3'-phosphate
  modified_base 10: mod_base = OTHER; note = 2'-fluorouridine-3'-phosphate
  modified_base 11: mod_base = OTHER; note = 2'-fluorouridine-3'-phosphate
  modified_base 12: mod_base = OTHER; note = 2'-O-methylguanosine-3'-phosphate
  modified_base 13: mod_base = OTHER; note = 2'-O-methyluridine-3'-phosphate
  modified_base 14: mod_base = OTHER; note = 2'-O-methyladenosine-3'-phosphate
  modified_base 15: mod_base = OTHER; note = 2'-O-methyladenosine-3'-phosphate
  modified_base 16: mod_base = OTHER; note = 2'-O-methylcytidine-3'-phosphate
  modified_base 17: mod_base = OTHER; note = 2'-O-methyluridine-3'-phosphate
  modified_base 18: mod_base = OTHER; note = 2'-O-methyluridine-3'-phosphate
  modified_base 19: mod_base = OTHER; note = 2'-O-methylguanosine-3'-phosphorothioate
  modified_base 20: mod_base = OTHER; note = 2'-O-methoxyethyl(MOE) adenosine-3'-phosphorothioate
  modified_base 21: mod_base = OTHER; note = 2'-O-methoxyethyl(MOE) adenosine-3'-phosphate-N-[tris(N-acetylgalactosamine-alkyl) -amidodecanoyl)]-4-hydroxyprolinol (Hyp-(N-acetylgalactosamine-alkyl)3)
gttttgcttttgtaacttgaa

SEQ ID NO: 951 - RNA, 21 nt, synthetic construct
  source 1..21: mol_type = other RNA
  modified_base 1: mod_base = OTHER; note = 2'-O-methoxyethyl(MOE) guanosine-3'-phosphorothioate
  modified_base 2: mod_base = OTHER; note = 2'-O-methoxyethyl(MOE)-thymidine(or 5-methyluridine)-3'- phosphorothioate
  modified_base 3: mod_base = OTHER; note = 2'-O-methyluridine-3'-phosphate
  modified_base 4: mod_base = OTHER; note = 2'-O-methyluridine-3'-phosphate
  modified_base 5: mod_base = OTHER; note = 2'-O-methyluridine-3'-phosphate
  modified_base 6: mod_base = OTHER; note = 2'-O-methylguanosine-3'-phosphate
  modified_base 7: mod_base = OTHER; note = 2'-fluorocytidine-3'-phosphate
  modified_base 8: mod_base = OTHER; note = 2'-O-methyluridine-3'-phosphate
  modified_base 9: mod_base = OTHER; note = 2'-fluorouridine-3'-phosphate
  modified_base 10: mod_base = OTHER; note = 2'-fluorouridine-3'-phosphate
  modified_base 11: mod_base = OTHER; note = 2'-fluorouridine-3'-phosphate
  modified_base 12: mod_base = OTHER; note = 2'-O-methylguanosine-3'-phosphate
  modified_base 13: mod_base = OTHER; note = 2'-O-methyluridine-3'-phosphate
  modified_base 14: mod_base = OTHER; note = 2'-O-methyladenosine-3'-phosphate
  modified_base 15: mod_base = OTHER; note = 2'-O-methyladenosine-3'-phosphate
  modified_base 16: mod_base = OTHER; note = 2'-O-methylcytidine-3'-phosphate
  modified_base 17: mod_base = OTHER; note = 2'-O-methyluridine-3'-phosphate
  modified_base 18: mod_base = OTHER; note = 2'-O-methyluridine-3'-phosphate
  modified_base 19: mod_base = OTHER; note = 2'-O-methylguanosine-3'-phosphorothioate
  modified_base 20: mod_base = OTHER; note = 2'-O-methoxyethyl(MOE) adenosine-3'-phosphorothioate
  modified_base 21: mod_base = OTHER; note = 2'-O-methoxyethyl(MOE) adenosine-3'-phosphate-(N1-hydroxyethanol-N12[tris(N-acetyl galactosamine-triethyleneglycol)]-diamidodecane]
gttttgcttttgtaacttgaa

SEQ ID NO: 952 - RNA, 21 nt, synthetic construct
  source 1..21: mol_type = other RNA
  modified_base 1: mod_base = OTHER; note = 2'-O-methoxyethyl(MOE) guanosine-3'-phosphorothioate
  modified_base 2: mod_base = OTHER; note = 2'-O-methoxyethyl(MOE)-thymidine(or 5-methyluridine)-3'- phosphorothioate
  modified_base 3: mod_base = OTHER; note = 2'-O-methyluridine-3'-phosphate
  modified_base 4: mod_base = OTHER; note = 2'-O-methyluridine-3'-phosphate
  modified_base 5: mod_base = OTHER; note = 2'-O-methyluridine-3'-phosphate
  modified_base 6: mod_base = OTHER; note = 2'-O-methylguanosine-3'-phosphate
  modified_base 7: mod_base = OTHER; note = 2'-fluorocytidine-3'-phosphate
  modified_base 8: mod_base = OTHER; note = 2'-O-methyluridine-3'-phosphate
  modified_base 9: mod_base = OTHER; note = 2'-fluorouridine-3'-phosphate
  modified_base 10: mod_base = OTHER; note = 2'-fluorouridine-3'-phosphate
  modified_base 11: mod_base = OTHER; note = 2'-fluorouridine-3'-phosphate
  modified_base 12: mod_base = OTHER; note = 2'-O-methylguanosine-3'-phosphate
  modified_base 13: mod_base = OTHER; note = 2'-O-methyluridine-3'-phosphate
  modified_base 14: mod_base = OTHER; note = 2'-O-methyladenosine-3'-phosphate
  modified_base 15: mod_base = OTHER; note = 2'-O-methyladenosine-3'-phosphate
  modified_base 16: mod_base = OTHER; note = 2'-O-methylcytidine-3'-phosphate
  modified_base 17: mod_base = OTHER; note = 2'-O-methyluridine-3'-phosphate
  modified_base 18: mod_base = OTHER; note = 2'-O-methyluridine-3'-phosphate
  modified_base 19: mod_base = OTHER; note = 2'-O-methylguanosine-3'-phosphorothioate
  modified_base 20: mod_base = OTHER; note = 2'-O-methoxyethyl(MOE) adenosine-3'-phosphorothioate
  modified_base 21: mod_base = OTHER; note = 2'-O-methoxyethyl(MOE) adenosine-3'-phosphate-(N1-hydroxyethanol-N12[tris(N-acetyl galactosamine-triethyleneglycol)]-diamidodecane]
gttttgcttttgtaacttgaa

SEQ ID NO: 953 - RNA, 21 nt, synthetic construct
  source 1..21: mol_type = other RNA
  modified_base 1: mod_base = OTHER; note = 2'-O-methoxyethyl(MOE) guanosine-3'-phosphorothioate
  modified_base 2: mod_base = OTHER; note = 2'-O-methoxyethyl(MOE)-thymidine(or 5-methyluridine)-3'- phosphorothioate
  modified_base 3: mod_base = OTHER; note = 2'-O-methyluridine-3'-phosphate
  modified_base 4: mod_base = OTHER; note = 2'-O-methyluridine-3'-phosphate
  modified_base 5: mod_base = OTHER; note = 2'-O-methyluridine-3'-phosphate
  modified_base 6: mod_base = OTHER; note = 2'-O-methylguanosine-3'-phosphate
  modified_base 7: mod_base = OTHER; note = 2'-fluorocytidine-3'-phosphate
  modified_base 8: mod_base = OTHER; note = 2'-O-methyluridine-3'-phosphate
  modified_base 9: mod_base = OTHER; note = 2'-fluorouridine-3'-phosphate
  modified_base 10: mod_base = OTHER; note = 2'-fluorouridine-3'-phosphate
  modified_base 11: mod_base = OTHER; note = 2'-fluorouridine-3'-phosphate
  modified_base 12: mod_base = OTHER; note = 2'-O-methylguanosine-3'-phosphate
  modified_base 13: mod_base = OTHER; note = 2'-O-methyluridine-3'-phosphate
  modified_base 14: mod_base = OTHER; note = 2'-O-methyladenosine-3'-phosphate
  modified_base 15: mod_base = OTHER; note = 2'-O-methyladenosine-3'-phosphate
  modified_base 16: mod_base = OTHER; note = 2'-O-methylcytidine-3'-phosphate
  modified_base 17: mod_base = OTHER; note = 2'-O-methyluridine-3'-phosphate
  modified_base 18: mod_base = OTHER; note = 2'-O-methyluridine-3'-phosphate
  modified_base 19: mod_base = OTHER; note = 2'-O-methylguanosine-3'-phosphorothioate
  modified_base 20: mod_base = OTHER; note = 2'-O-methoxyethyl(MOE) adenosine-3'-phosphorothioate
  modified_base 21: mod_base = OTHER; note = 2'-O-methoxyethyl(MOE) adenosine-3'-phosphate-(N1-hydroxyethanol-N12[tris(N-acetyl galactosamine-triethyleneglycol)]-diamidodecane]
gttttgcttttgtaacttgaa

SEQ ID NO: 954 - RNA, 21 nt, synthetic construct
  source 1..21: mol_type = other RNA
  modified_base 1: mod_base = OTHER; note = 2'-O-methoxyethyl(MOE) guanosine-3'-phosphorothioate
  modified_base 2: mod_base = OTHER; note = 2'-O-methoxyethyl(MOE)-thymidine(or 5-methyluridine)-3'- phosphorothioate
  modified_base 3: mod_base = OTHER; note = 2'-O-methyluridine-3'-phosphate
  modified_base 4: mod_base = OTHER; note = 2'-O-methyluridine-3'-phosphate
  modified_base 5: mod_base = OTHER; note = 2'-O-methyluridine-3'-phosphate
  modified_base 6: mod_base = OTHER; note = 2'-O-methylguanosine-3'-phosphate
  modified_base 7: mod_base = OTHER; note = 2'-fluorocytidine-3'-phosphate
  modified_base 8: mod_base = OTHER; note = 2'-O-methyluridine-3'-phosphate
  modified_base 9: mod_base = OTHER; note = 2'-fluorouridine-3'-phosphate
  modified_base 10: mod_base = OTHER; note = 2'-fluorouridine-3'-phosphate
  modified_base 11: mod_base = OTHER; note = 2'-fluorouridine-3'-phosphate
  modified_base 12: mod_base = OTHER; note = 2'-O-methylguanosine-3'-phosphate
  modified_base 13: mod_base = OTHER; note = 2'-O-methyluridine-3'-phosphate
  modified_base 14: mod_base = OTHER; note = 2'-O-methyladenosine-3'-phosphate
  modified_base 15: mod_base = OTHER; note = 2'-O-methyladenosine-3'-phosphate
  modified_base 16: mod_base = OTHER; note = 2'-O-methylcytidine-3'-phosphate
  modified_base 17: mod_base = OTHER; note = 2'-O-methyluridine-3'-phosphate
  modified_base 18: mod_base = OTHER; note = 2'-O-methyluridine-3'-phosphate
  modified_base 19: mod_base = OTHER; note = 2'-O-methylguanosine-3'-phosphorothioate
  modified_base 20: mod_base = OTHER; note = 2'-O-methoxyethyl(MOE) adenosine-3'-phosphorothioate
  modified_base 21: mod_base = OTHER; note = 2'-O-methoxyethyl(MOE) adenosine-3'-phosphate-(N1-hydroxyethanol-N12[tris(N-acetyl galactosamine-triethyleneglycol)]-diamidodecane]
gttttgcttttgtaacttgaa

SEQ ID NO: 955 - RNA, 21 nt, synthetic construct
  source 1..21: mol_type = other RNA
  modified_base 1: mod_base = OTHER; note = 2'-O-methoxyethyl(MOE) guanosine-3'-phosphorothioate
  modified_base 2: mod_base = OTHER; note = 2'-O-methoxyethyl(MOE)-thymidine(or 5-methyluridine)-3'- phosphorothioate
  modified_base 3: mod_base = OTHER; note = 2'-O-methyluridine-3'-phosphate
  modified_base 4: mod_base = OTHER; note = 2'-O-methyluridine-3'-phosphate
  modified_base 5: mod_base = OTHER; note = 2'-O-methyluridine-3'-phosphate
  modified_base 6: mod_base = OTHER; note = 2'-O-methylguanosine-3'-phosphate
  modified_base 7: mod_base = OTHER; note = 2'-fluorocytidine-3'-phosphate
  modified_base 8: mod_base = OTHER; note = 2'-O-methyluridine-3'-phosphate
  modified_base 9: mod_base = OTHER; note = 2'-fluorouridine-3'-phosphate
  modified_base 10: mod_base = OTHER; note = 2'-fluorouridine-3'-phosphate
  modified_base 11: mod_base = OTHER; note = 2'-fluorouridine-3'-phosphate
  modified_base 12: mod_base = OTHER; note = 2'-O-methylguanosine-3'-phosphate
  modified_base 13: mod_base = OTHER; note = 2'-O-methyluridine-3'-phosphate
  modified_base 14: mod_base = OTHER; note = 2'-O-methyladenosine-3'-phosphate
  modified_base 15: mod_base = OTHER; note = 2'-O-methyladenosine-3'-phosphate
  modified_base 16: mod_base = OTHER; note = 2'-O-methylcytidine-3'-phosphate
  modified_base 17: mod_base = OTHER; note = 2'-O-methyluridine-3'-phosphate
  modified_base 18: mod_base = OTHER; note = 2'-O-methyluridine-3'-phosphate
  modified_base 19: mod_base = OTHER; note = 2'-O-methylguanosine-3'-phosphorothioate
  modified_base 20: mod_base = OTHER; note = 2'-O-methoxyethyl(MOE) adenosine-3'-phosphorothioate
  modified_base 21: mod_base = OTHER; note = 2'-O-methoxyethyl(MOE) adenosine-3'-phosphate-(N1-hydroxyethanol-N12[tris(N-acetyl galactosamine-triethyleneglycol)]-diamidodecane]
gttttgcttttgtaacttgaa

SEQ ID NO: 956 - RNA, 23 nt, synthetic construct
  source 1..23: mol_type = other RNA
  modified_base 1: mod_base = OTHER; note = 2'-O-methyladenosine-3'-phosphorothioate
  modified_base 2: mod_base = OTHER; note = 2'-fluorocytidine-3'-phosphorothioate
  modified_base 3: mod_base = OTHER; note = 2'-O-methyladenosine-3'-phosphate
  modified_base 4: mod_base = OTHER; note = 2'-fluoroadenosine-3'-phosphate
  modified_base 5: mod_base = OTHER; note = 2'-fluoroadenosine-3'-phosphate
  modified_base 6: mod_base = OTHER; note = 2'-fluoroadenosine-3'-phosphate
  modified_base 7: mod_base = OTHER; note = 2'-O-methylguanosine-3'-phosphate
  modified_base 8: mod_base = OTHER; note = 2'-fluorocytidine-3'-phosphate
  modified_base 9: mod_base = OTHER; note = 2'-O-methyladenosine-3'-phosphate
  modified_base 10: mod_base = OTHER; note = 2'-fluoroadenosine-3'-phosphate
  modified_base 11: mod_base = OTHER; note = 2'-O-methyladenosine-3'-phosphate
  modified_base 12: mod_base = OTHER; note = 2'-fluoroadenosine-3'-phosphate
  modified_base 13: mod_base = OTHER; note = 2'-O-methylcytidine-3'-phosphate
  modified_base 14: mod_base = OTHER; note = 2'-fluoroadenosine-3'-phosphate
  modified_base 15: mod_base = OTHER; note = 2'-O-methylguanosine-3'-phosphate
  modified_base 16: mod_base = OTHER; note = 2'-fluoroguanosine-3'-phosphate
  modified_base 17: mod_base = OTHER; note = 2'-O-methyluridine-3'-phosphate
  modified_base 18: mod_base = OTHER; note = 2'-fluorocytidine-3'-phosphate
  modified_base 19: mod_base = OTHER; note = 2'-O-methyluridine-3'-phosphate
  modified_base 20: mod_base = OTHER; note = 2'-O-methyladenosine-3'-phosphate
  modified_base 21: mod_base = OTHER; note = 2'-O-methylguanosine-3'-phosphorothioate
  modified_base 22: mod_base = OTHER; note = 2'-O-methyladenosine-3'-phosphorothioate
  modified_base 23: mod_base = OTHER; note = 2'-O-methyladenosine
acaaaagcaaaacaggtctagaa

SEQ ID NO: 957 - RNA, 23 nt, synthetic construct
  source 1..23: mol_type = other RNA
  modified_base 1: mod_base = OTHER; note = 2'-O-methyladenosine-3'-phosphorothioate
  modified_base 2: mod_base = OTHER; note = 2'-fluorocytidine-3'-phosphorothioate
  modified_base 3: mod_base = OTHER; note = 2'-O-methyladenosine-3'-phosphate
  modified_base 4: mod_base = OTHER; note = 2'-O-methyladenosine-3'-phosphate
  modified_base 5: mod_base = OTHER; note = 2'-O-methyladenosine-3'-phosphate
  modified_base 6: mod_base = OTHER; note = 2'-fluoroadenosine-3'-phosphate
  modified_base 7: mod_base = OTHER; note = 2'-O-methylguanosine-3'-phosphate
  modified_base 8: mod_base = OTHER; note = 2'-O-methylcytidine-3'-phosphate
  modified_base 9: mod_base = OTHER; note = 2'-O-methyladenosine-3'-phosphate
  modified_base 10: mod_base = OTHER; note = 2'-O-methyladenosine-3'-phosphate
  modified_base 11: mod_base = OTHER; note = 2'-O-methyladenosine-3'-phosphate
  modified_base 12: mod_base = OTHER; note = 2'-O-methyladenosine-3'-phosphate
  modified_base 13: mod_base = OTHER; note = 2'-O-methylcytidine-3'-phosphate
  modified_base 14: mod_base = OTHER; note = 2'-fluoroadenosine-3'-phosphate
  modified_base 15: mod_base = OTHER; note = 2'-O-methylguanosine-3'-phosphate
  modified_base 16: mod_base = OTHER; note = 2'-fluoroguanosine-3'-phosphate
  modified_base 17: mod_base = OTHER; note = 2'-O-methyluridine-3'-phosphate
  modified_base 18: mod_base = OTHER; note = 2'-O-methylcytidine-3'-phosphate
  modified_base 19: mod_base = OTHER; note = 2'-O-methyluridine-3'-phosphate
  modified_base 20: mod_base = OTHER; note = 2'-O-methyladenosine-3'-phosphate
  modified_base 21: mod_base = OTHER; note = 2'-O-methylguanosine-3'-phosphorothioate
  modified_base 22: mod_base = OTHER; note = 2'-O-methyladenosine-3'-phosphorothioate
  modified_base 23: mod_base = OTHER; note = 2'-O-methyladenosine
acaaaagcaaaacaggtctagaa

SEQ ID NO: 958 - RNA, 23 nt, synthetic construct
  source 1..23: mol_type = other RNA
  modified_base 1: mod_base = OTHER; note 5'-(E)-vinylphosphonate-2'-O-methyladenosine-3'-phosphoroth ioate
  modified_base 2: mod_base = OTHER; note = 2'-fluorocytidine-3'-phosphorothioate
  modified_base 3: mod_base = OTHER; note = 2'-O-methyladenosine-3'-phosphate
  modified_base 4: mod_base = OTHER; note = 2'-O-methyladenosine-3'-phosphate
  modified_base 5: mod_base = OTHER; note = 2'-O-methyladenosine-3'-phosphate
  modified_base 6: mod_base = OTHER; note = 2'-fluoroadenosine-3'-phosphate
  modified_base 7: mod_base = OTHER; note = 2'-O-methylguanosine-3'-phosphate
  modified_base 8: mod_base = OTHER; note = 2'-O-methylcytidine-3'-phosphate
  modified_base 9: mod_base = OTHER; note = 2'-O-methyladenosine-3'-phosphate
  modified_base 10: mod_base = OTHER; note = 2'-O-methyladenosine-3'-phosphate
  modified_base 11: mod_base = OTHER; note = 2'-O-methyladenosine-3'-phosphate
  modified_base 12: mod_base = OTHER; note = 2'-O-methyladenosine-3'-phosphate
  modified_base 13: mod_base = OTHER; note = 2'-O-methylcytidine-3'-phosphate
  modified_base 14: mod_base = OTHER; note = 2'-fluoroadenosine-3'-phosphate
  modified_base 15: mod_base = OTHER; note = 2'-O-methylguanosine-3'-phosphate
  modified_base 16: mod_base = OTHER; note = 2'-fluoroguanosine-3'-phosphate
  modified_base 17: mod_base = OTHER; note = 2'-O-methyluridine-3'-phosphate
  modified_base 18: mod_base = OTHER; note = 2'-O-methylcytidine-3'-phosphate
  modified_base 19: mod_base = OTHER; note = 2'-O-methyluridine-3'-phosphate
  modified_base 20: mod_base = OTHER; note = 2'-O-methyladenosine-3'-phosphate
  modified_base 21: mod_base = OTHER; note = 2'-O-methylguanosine-3'-phosphorothioate
  modified_base 22: mod_base = OTHER; note = 2'-O-methyladenosine-3'-phosphorothioate
  modified_base 23: mod_base = OTHER; note = 2'-O-methyladenosine
acaaaagcaaaacaggtctagaa

SEQ ID NO: 959 - RNA, 23 nt, synthetic construct
  source 1..23: mol_type = other RNA
  modified_base 1: mod_base = OTHER; note 5'-(E)-vinylphosphonate-2'-O-methyladenosine-3'-phosphoroth ioate
  modified_base 2: mod_base = OTHER; note = 2'-fluorocytidine-3'-phosphorothioate
  modified_base 3: mod_base = OTHER; note = 2'-O-methyladenosine-3'-phosphate
  modified_base 4: mod_base = OTHER; note = 2'-O-methyladenosine-3'-phosphate
  modified_base 5: mod_base = OTHER; note = 2'-O-methyladenosine-3'-phosphate
  modified_base 6: mod_base = OTHER; note = 2'-fluoroadenosine-3'-phosphate
  modified_base 7: mod_base = OTHER; note = 2'-O-methylguanosine-3'-phosphate
  modified_base 8: mod_base = OTHER; note = 2'-O-methylcytidine-3'-phosphate
  modified_base 9: mod_base = OTHER; note = 2'-O-methyladenosine-3'-phosphate
  modified_base 10: mod_base = OTHER; note = 2'-O-methyladenosine-3'-phosphate
  modified_base 11: mod_base = OTHER; note = 2'-O-methyladenosine-3'-phosphate
  modified_base 12: mod_base = OTHER; note = 2'-O-methyladenosine-3'-phosphate
  modified_base 13: mod_base = OTHER; note = 2'-O-methylcytidine-3'-phosphate
  modified_base 14: mod_base = OTHER; note = 2'-fluoroadenosine-3'-phosphate
  modified_base 15: mod_base = OTHER; note = 2'-O-methylguanosine-3'-phosphate
  modified_base 16: mod_base = OTHER; note = 2'-fluoroguanosine-3'-phosphate
  modified_base 17: mod_base = OTHER; note = 2'-O-methyluridine-3'-phosphate
  modified_base 18: mod_base = OTHER; note = 2'-O-methylcytidine-3'-phosphate
  modified_base 19: mod_base = OTHER; note = 2'-O-methyluridine-3'-phosphate
  modified_base 20: mod_base = OTHER; note = 2'-O-methyladenosine-3'-phosphate
  modified_base 21: mod_base = OTHER; note = 2'-O-methylguanosine-3'-phosphorothioate
  modified_base 22: mod_base = OTHER; note = 2'-O-methyladenosine-3'-phosphorothioate
  modified_base 23: mod_base = OTHER; note = 2'-O-methyladenosine
acaaaagcaaaacaggtctagaa

SEQ ID NO: 960 - RNA, 23 nt, synthetic construct
  source 1..23: mol_type = other RNA
  modified_base 1: mod_base = OTHER; note = 2'-O-methyladenosine-3'-phosphorothioate
  modified_base 2: mod_base = OTHER; note = 2'-fluorocytidine-3'-phosphorothioate
  modified_base 3: mod_base = OTHER; note = 2'-O-methyladenosine-3'-phosphate
  modified_base 4: mod_base = OTHER; note = 2'-O-methyladenosine-3'-phosphate
  modified_base 5: mod_base = OTHER; note = 2'-O-methyladenosine-3'-phosphate
  modified_base 6: mod_base = OTHER; note = 2'-fluoroadenosine-3'-phosphate
  modified_base 7: mod_base = OTHER; note = 2'-O-methylguanosine-3'-phosphate
  modified_base 8: mod_base = OTHER; note = 2'-O-methylcytidine-3'-phosphate
  modified_base 9: mod_base = OTHER; note = 2'-O-methyladenosine-3'-phosphate
  modified_base 10: mod_base = OTHER; note = 2'-O-methyladenosine-3'-phosphate
  modified_base 11: mod_base = OTHER; note = 2'-O-methyladenosine-3'-phosphate
  modified_base 12: mod_base = OTHER; note = 2'-O-methyladenosine-3'-phosphate
  modified_base 13: mod_base = OTHER; note = 2'-O-methylcytidine-3'-phosphate
  modified_base 14: mod_base = OTHER; note = 2'-fluoroadenosine-3'-phosphate
  modified_base 15: mod_base = OTHER; note = 2'-O-methylguanosine-3'-phosphate
  modified_base 16: mod_base = OTHER; note = 2'-fluoroguanosine-3'-phosphate
  modified_base 17: mod_base = OTHER; note = 2'-O-methyluridine-3'-phosphate
  modified_base 18: mod_base = OTHER; note = 2'-O-methylcytidine-3'-phosphate
  modified_base 19: mod_base = OTHER; note = 2'-O-methyluridine-3'-phosphate
  modified_base 20: mod_base = OTHER; note = 2'-O-methyladenosine-3'-phosphate
  modified_base 21: mod_base = OTHER; note = 2'-O-methylguanosine-3'-phosphorothioate
  modified_base 22: mod_base = OTHER; note = 2'-O-methyladenosine-3'-phosphorothioate
  modified_base 23: mod_base = OTHER; note = 2'-O-methyladenosine
acaaaagcaaaacaggtctagaa

SEQ ID NO: 961 - RNA, 23 nt, synthetic construct
  source 1..23: mol_type = other RNA
  modified_base 1: mod_base = OTHER; note 5'-(E)-vinylphosphonate-2'-O-methyluridine-3'-phosphorothio ate
  modified_base 2: mod_base = OTHER; note = 2'-fluorocytidine-3'-phosphorothioate
  modified_base 3: mod_base = OTHER; note = 2'-O-methyladenosine-3'-phosphate
  modified_base 4: mod_base = OTHER; note = 2'-O-methyladenosine-3'-phosphate
  modified_base 5: mod_base = OTHER; note = 2'-O-methyladenosine-3'-phosphate
  modified_base 6: mod_base = OTHER; note = 2'-fluoroadenosine-3'-phosphate
  modified_base 7: mod_base = OTHER; note = 2'-O-methylguanosine-3'-phosphate
  modified_base 8: mod_base = OTHER; note = 2'-O-methylcytidine-3'-phosphate
  modified_base 9: mod_base = OTHER; note = 2'-O-methyladenosine-3'-phosphate
  modified_base 10: mod_base = OTHER; note = 2'-O-methyladenosine-3'-phosphate
  modified_base 11: mod_base = OTHER; note = 2'-O-methyladenosine-3'-phosphate
  modified_base 12: mod_base = OTHER; note = 2'-O-methyladenosine-3'-phosphate
  modified_base 13: mod_base = OTHER; note = 2'-O-methylcytidine-3'-phosphate
  modified_base 14: mod_base = OTHER; note = 2'-fluoroadenosine-3'-phosphate
  modified_base 15: mod_base = OTHER; note = 2'-O-methylguanosine-3'-phosphate
  modified_base 16: mod_base = OTHER; note = 2'-fluoroguanosine-3'-phosphate
  modified_base 17: mod_base = OTHER; note = 2'-O-methyluridine-3'-phosphate
  modified_base 18: mod_base = OTHER; note = 2'-O-methylcytidine-3'-phosphate
  modified_base 19: mod_base = OTHER; note = 2'-O-methyluridine-3'-phosphate
  modified_base 20: mod_base = OTHER; note = 2'-O-methyladenosine-3'-phosphate
  modified_base 21: mod_base = OTHER; note = 2'-O-methylguanosine-3'-phosphorothioate
  modified_base 22: mod_base = OTHER; note = 2'-O-methoxyethyl(MOE) adenosine-3'-phosphorothioate
  modified_base 23: mod_base = OTHER; note = 2'-O-methoxyethyl(MOE) adenosine
tcaaaagcaaaacaggtctagaa

SEQ ID NO: 962 - RNA, 23 nt, synthetic construct
  source 1..23: mol_type = other RNA
  modified_base 1: mod_base = OTHER; note = 2'-O-methyladenosine-3'-phosphorothioate
  modified_base 2: mod_base = OTHER; note = 2'-fluorocytidine-3'-phosphorothioate
  modified_base 3: mod_base = OTHER; note = 2'-O-methyladenosine-3'-phosphate
  modified_base 4: mod_base = OTHER; note = 2'-fluoroadenosine-3'-phosphate
  modified_base 5: mod_base = OTHER; note = 2'-fluoroadenosine-3'-phosphate
  modified_base 6: mod_base = OTHER; note = 2'-fluoroadenosine-3'-phosphate
  modified_base 7: mod_base = OTHER; note = 2'-O-methylguanosine-3'-phosphate
  modified_base 8: mod_base = OTHER; note = 2'-fluorocytidine-3'-phosphate
  modified_base 9: mod_base = OTHER; note = 2'-O-methyladenosine-3'-phosphate
  modified_base 10: mod_base = OTHER; note = 2'-fluoroadenosine-3'-phosphate
  modified_base 11: mod_base = OTHER; note = 2'-O-methyladenosine-3'-phosphate
  modified_base 12: mod_base = OTHER; note = 2'-fluoroadenosine-3'-phosphate
  modified_base 13: mod_base = OTHER; note = 2'-O-methylcytidine-3'-phosphate
  modified_base 14: mod_base = OTHER; note = 2'-fluoroadenosine-3'-phosphate
  modified_base 15: mod_base = OTHER; note = 2'-O-methylguanosine-3'-phosphate
  modified_base 16: mod_base = OTHER; note = 2'-fluoroguanosine-3'-phosphate
  modified_base 17: mod_base = OTHER; note = 2'-O-methyluridine-3'-phosphate
  modified_base 18: mod_base = OTHER; note = 2'-fluorocytidine-3'-phosphate
  modified_base 19: mod_base = OTHER; note = 2'-O-methyluridine-3'-phosphate
  modified_base 20: mod_base = OTHER; note = 2'-O-methyladenosine-3'-phosphate
  modified_base 21: mod_base = OTHER; note = 2'-O-methylguanosine-3'-phosphorothioate
  modified_base 22: mod_base = OTHER; note = 2'-O-methyladenosine-3'-phosphorothioate
  modified_base 23: mod_base = OTHER; note = 2'-O-methyladenosine
acaaaagcaaaacaggtctagaa

SEQ ID NO: 963 - RNA, 23 nt, synthetic construct
  source 1..23: mol_type = other RNA
  modified_base 1: mod_base = OTHER; note 5'-(E)-vinylphosphonate-2'-O-methyladenosine-3'-phosphoroth ioate
  modified_base 2: mod_base = OTHER; note = 2'-fluorocytidine-3'-phosphorothioate
  modified_base 3: mod_base = OTHER; note = 2'-O-methyladenosine-3'-phosphate
  modified_base 4: mod_base = OTHER; note = 2'-O-methyladenosine-3'-phosphate
  modified_base 5: mod_base = OTHER; note = 2'-O-methyladenosine-3'-phosphate
  modified_base 6: mod_base = OTHER; note = 2'-fluoroadenosine-3'-phosphate
  modified_base 7: mod_base = OTHER; note = 2'-O-methylguanosine-3'-phosphate
  modified_base 8: mod_base = OTHER; note = 2'-O-methylcytidine-3'-phosphate
  modified_base 9: mod_base = OTHER; note = 2'-O-methyladenosine-3'-phosphate
  modified_base 10: mod_base = OTHER; note = 2'-O-methyladenosine-3'-phosphate
  modified_base 11: mod_base = OTHER; note = 2'-O-methyladenosine-3'-phosphate
  modified_base 12: mod_base = OTHER; note = 2'-O-methyladenosine-3'-phosphate
  modified_base 13: mod_base = OTHER; note = 2'-O-methylcytidine-3'-phosphate
  modified_base 14: mod_base = OTHER; note = 2'-fluoroadenosine-3'-phosphate
  modified_base 15: mod_base = OTHER; note = 2'-O-methylguanosine-3'-phosphate
  modified_base 16: mod_base = OTHER; note = 2'-fluoroguanosine-3'-phosphate
  modified_base 17: mod_base = OTHER; note = 2'-O-methyluridine-3'-phosphate
  modified_base 18: mod_base = OTHER; note = 2'-O-methylcytidine-3'-phosphate
  modified_base 19: mod_base = OTHER; note = 2'-O-methyluridine-3'-phosphate
  modified_base 20: mod_base = OTHER; note = 2'-O-methyladenosine-3'-phosphate
  modified_base 21: mod_base = OTHER; note = 2'-O-methylguanosine-3'-phosphorothioate
  modified_base 22: mod_base = OTHER; note = 2'-O-methyladenosine-3'-phosphorothioate
  modified_base 23: mod_base = OTHER; note = 2'-O-methyladenosine
acaaaagcaaaacaggtctagaa

SEQ ID NO: 964 - RNA, 23 nt, synthetic construct
  source 1..23: mol_type = other RNA
  modified_base 1: mod_base = OTHER; note = 2'-O-methyladenosine-3'-phosphorothioate
  modified_base 2: mod_base = OTHER; note = 2'-fluorocytidine-3'-phosphorothioate
  modified_base 3: mod_base = OTHER; note = 2'-O-methyladenosine-3'-phosphate
  modified_base 4: mod_base = OTHER; note = 2'-O-methyladenosine-3'-phosphate
  modified_base 5: mod_base = OTHER; note = 2'-O-methyladenosine-3'-phosphate
  modified_base 6: mod_base = OTHER; note = 2'-fluoroadenosine-3'-phosphate
  modified_base 7: mod_base = OTHER; note = 2'-O-methylguanosine-3'-phosphate
  modified_base 8: mod_base = OTHER; note = 2'-O-methylcytidine-3'-phosphate
  modified_base 9: mod_base = OTHER; note = 2'-O-methyladenosine-3'-phosphate
  modified_base 10: mod_base = OTHER; note = 2'-O-methyladenosine-3'-phosphate
  modified_base 11: mod_base = OTHER; note = 2'-O-methyladenosine-3'-phosphate
  modified_base 12: mod_base = OTHER; note = 2'-O-methyladenosine-3'-phosphate
  modified_base 13: mod_base = OTHER; note = 2'-O-methylcytidine-3'-phosphate
  modified_base 14: mod_base = OTHER; note = 2'-fluoroadenosine-3'-phosphate
  modified_base 15: mod_base = OTHER; note = 2'-O-methylguanosine-3'-phosphate
  modified_base 16: mod_base = OTHER; note = 2'-fluoroguanosine-3'-phosphate
  modified_base 17: mod_base = OTHER; note = 2'-O-methyluridine-3'-phosphate
  modified_base 18: mod_base = OTHER; note = 2'-O-methylcytidine-3'-phosphate
  modified_base 19: mod_base = OTHER; note = 2'-O-methyluridine-3'-phosphate
  modified_base 20: mod_base = OTHER; note = 2'-O-methyladenosine-3'-phosphate
  modified_base 21: mod_base = OTHER; note = 2'-O-methylguanosine-3'-phosphorothioate
  modified_base 22: mod_base = OTHER; note = 2'-O-methyladenosine-3'-phosphorothioate
  modified_base 23: mod_base = OTHER; note = 2'-O-methyladenosine
acaaaagcaaaacaggtctagaa

SEQ ID NO: 965 - RNA, 23 nt, synthetic construct
  source 1..23: mol_type = other RNA
  modified_base 1: mod_base = OTHER; note 5'-(E)-vinylphosphonate-2'-O-methyladenosine-3'-phosphoroth ioate
  modified_base 2: mod_base = OTHER; note = 2'-fluorocytidine-3'-phosphorothioate
  modified_base 3: mod_base = OTHER; note = 2'-O-methyladenosine-3'-phosphate
  modified_base 4: mod_base = OTHER; note = 2'-O-methyladenosine-3'-phosphate
  modified_base 5: mod_base = OTHER; note = 2'-O-methyladenosine-3'-phosphate
  modified_base 6: mod_base = OTHER; note = 2'-fluoroadenosine-3'-phosphate
  modified_base 7: mod_base = OTHER; note = 2'-O-methylguanosine-3'-phosphate
  modified_base 8: mod_base = OTHER; note = 2'-O-methylcytidine-3'-phosphate
  modified_base 9: mod_base = OTHER; note = 2'-O-methyladenosine-3'-phosphate
  modified_base 10: mod_base = OTHER; note = 2'-O-methyladenosine-3'-phosphate
  modified_base 11: mod_base = OTHER; note = 2'-O-methyladenosine-3'-phosphate
  modified_base 12: mod_base = OTHER; note = 2'-O-methyladenosine-3'-phosphate
  modified_base 13: mod_base = OTHER; note = 2'-O-methylcytidine-3'-phosphate
  modified_base 14: mod_base = OTHER; note = 2'-fluoroadenosine-3'-phosphate
  modified_base 15: mod_base = OTHER; note = 2'-O-methylguanosine-3'-phosphate
  modified_base 16: mod_base = OTHER; note = 2'-fluoroguanosine-3'-phosphate
  modified_base 17: mod_base = OTHER; note = 2'-O-methyluridine-3'-phosphate
  modified_base 18: mod_base = OTHER; note = 2'-O-methylcytidine-3'-phosphate
  modified_base 19: mod_base = OTHER; note = 2'-O-methyluridine-3'-phosphate
  modified_base 20: mod_base = OTHER; note = 2'-O-methyladenosine-3'-phosphate
  modified_base 21: mod_base = OTHER; note = 2'-O-methylguanosine-3'-phosphorothioate
  modified_base 22: mod_base = OTHER; note = 2'-O-methyladenosine-3'-phosphorothioate
  modified_base 23: mod_base = OTHER; note = 2'-O-methyladenosine
acaaaagcaaaacaggtctagaa

SEQ ID NO: 966 - RNA, 23 nt, synthetic construct
  source 1..23: mol_type = other RNA
  modified_base 1: mod_base = OTHER; note 5'-(E)-vinylphosphonate-2'-O-methyluridine-3'-phosphorothio ate
  modified_base 2: mod_base = OTHER; note = 2'-fluorocytidine-3'-phosphorothioate
  modified_base 3: mod_base = OTHER; note = 2'-O-methyladenosine-3'-phosphate
  modified_base 4: mod_base = OTHER; note = 2'-O-methyladenosine-3'-phosphate
  modified_base 5: mod_base = OTHER; note = 2'-O-methyladenosine-3'-phosphate
  modified_base 6: mod_base = OTHER; note = 2'-fluoroadenosine-3'-phosphate
  modified_base 7: mod_base = OTHER; note = 2'-O-methylguanosine-3'-phosphate
  modified_base 8: mod_base = OTHER; note = 2'-O-methylcytidine-3'-phosphate
  modified_base 9: mod_base = OTHER; note = 2'-O-methyladenosine-3'-phosphate
  modified_base 10: mod_base = OTHER; note = 2'-O-methyladenosine-3'-phosphate
  modified_base 11: mod_base = OTHER; note = 2'-O-methyladenosine-3'-phosphate
  modified_base 12: mod_base = OTHER; note = 2'-O-methyladenosine-3'-phosphate
  modified_base 13: mod_base = OTHER; note = 2'-O-methylcytidine-3'-phosphate
  modified_base 14: mod_base = OTHER; note = 2'-fluoroadenosine-3'-phosphate
  modified_base 15: mod_base = OTHER; note = 2'-O-methylguanosine-3'-phosphate
  modified_base 16: mod_base = OTHER; note = 2'-fluoroguanosine-3'-phosphate
  modified_base 17: mod_base = OTHER; note = 2'-O-methyluridine-3'-phosphate
  modified_base 18: mod_base = OTHER; note = 2'-O-methylcytidine-3'-phosphate
  modified_base 19: mod_base = OTHER; note = 2'-O-methyluridine-3'-phosphate
  modified_base 20: mod_base = OTHER; note = 2'-O-methyladenosine-3'-phosphate
  modified_base 21: mod_base = OTHER; note = 2'-O-methylguanosine-3'-phosphorothioate
  modified_base 22: mod_base = OTHER; note = 2'-O-methyladenosine-3'-phosphorothioate
  modified_base 23: mod_base = OTHER; note = 2'-O-methyladenosine
tcaaaagcaaaacaggtctagaa

SEQ ID NO: 967 - RNA, 23 nt, synthetic construct
  source 1..23: mol_type = other RNA
  modified_base 1: mod_base = OTHER; note 5'-(E)-vinylphosphonate-2'-O-methyluridine-3'-phosphorothio ate
  modified_base 2: mod_base = OTHER; note = 2'-fluorocytidine-3'-phosphorothioate
  modified_base 3: mod_base = OTHER; note = 2'-O-methyladenosine-3'-phosphate
  modified_base 4: mod_base = OTHER; note = 2'-O-methyladenosine-3'-phosphate
  modified_base 5: mod_base = OTHER; note = 2'-O-methyladenosine-3'-phosphate
  modified_base 6: mod_base = OTHER; note = 2'-fluoroadenosine-3'-phosphate
  modified_base 7: mod_base = OTHER; note = 2'-O-methylguanosine-3'-phosphate
  modified_base 8: mod_base = OTHER; note = 2'-O-methylcytidine-3'-phosphate
  modified_base 9: mod_base = OTHER; note = 2'-O-methyladenosine-3'-phosphate
  modified_base 10: mod_base = OTHER; note = 2'-O-methyladenosine-3'-phosphate
  modified_base 11: mod_base = OTHER; note = 2'-O-methyladenosine-3'-phosphate
  modified_base 12: mod_base = OTHER; note = 2'-O-methyladenosine-3'-phosphate
  modified_base 13: mod_base = OTHER; note = 2'-O-methylcytidine-3'-phosphate
  modified_base 14: mod_base = OTHER; note = 2'-fluoroadenosine-3'-phosphate
  modified_base 15: mod_base = OTHER; note = 2'-O-methylguanosine-3'-phosphate
  modified_base 16: mod_base = OTHER; note = 2'-fluoroguanosine-3'-phosphate
  modified_base 17: mod_base = OTHER; note = 2'-O-methyluridine-3'-phosphate
  modified_base 18: mod_base = OTHER; note = 2'-O-methylcytidine-3'-phosphate
  modified_base 19: mod_base = OTHER; note = 2'-O-methyluridine-3'-phosphate
  modified_base 20: mod_base = OTHER; note = 2'-O-methyladenosine-3'-phosphate
  modified_base 21: mod_base = OTHER; note = 2'-O-methylguanosine-3'-phosphorothioate
  modified_base 22: mod_base = OTHER; note = 2'-O-methyladenosine-3'-phosphorothioate
  modified_base 23: mod_base = OTHER; note = 2'-O-methyladenosine
tcaaaagcaaaacaggtctagaa

SEQ ID NO: 968 - RNA, 23 nt, synthetic construct
  source 1..23: mol_type = other RNA
  modified_base 1: mod_base = OTHER; note 5'-(E)-vinylphosphonate-2'-O-methyladenosine-3'-phosphoroth ioate
  modified_base 2: mod_base = OTHER; note = 2'-fluorocytidine-3'-phosphorothioate
  modified_base 3: mod_base = OTHER; note = 2'-O-methyladenosine-3'-phosphate
  modified_base 4: mod_base = OTHER; note = 2'-O-methyladenosine-3'-phosphate
  modified_base 5: mod_base = OTHER; note = 2'-O-methyladenosine-3'-phosphate
  modified_base 6: mod_base = OTHER; note = 2'-fluoroadenosine-3'-phosphate
  modified_base 7: mod_base = OTHER; note = 2'-O-methylguanosine-3'-phosphate
  modified_base 8: mod_base = OTHER; note = 2'-O-methylcytidine-3'-phosphate
  modified_base 9: mod_base = OTHER; note = 2'-O-methyladenosine-3'-phosphate
  modified_base 10: mod_base = OTHER; note = 2'-O-methyladenosine-3'-phosphate
  modified_base 11: mod_base = OTHER; note = 2'-O-methyladenosine-3'-phosphate
  modified_base 12: mod_base = OTHER; note = 2'-O-methyladenosine-3'-phosphate
  modified_base 13: mod_base = OTHER; note = 2'-O-methylcytidine-3'-phosphate
  modified_base 14: mod_base = OTHER; note = 2'-fluoroadenosine-3'-phosphate
  modified_base 15: mod_base = OTHER; note = 2'-O-methylguanosine-3'-phosphate
  modified_base 16: mod_base = OTHER; note = 2'-fluoroguanosine-3'-phosphate
  modified_base 17: mod_base = OTHER; note = 2'-O-methyluridine-3'-phosphate
  modified_base 18: mod_base = OTHER; note = 2'-O-methylcytidine-3'-phosphate
  modified_base 19: mod_base = OTHER; note = 2'-O-methyluridine-3'-phosphate
  modified_base 20: mod_base = OTHER; note = 2'-O-methyladenosine-3'-phosphate
  modified_base 21: mod_base = OTHER; note = 2'-O-methylguanosine-3'-phosphorothioate
  modified_base 22: mod_base = OTHER; note = 2'-O-methyladenosine-3'-phosphorothioate
  modified_base 23: mod_base = OTHER; note = 2'-O-methyladenosine
acaaaagcaaaacaggtctagaa

SEQ ID NO: 969 - RNA, 23 nt, synthetic construct
  source 1..23: mol_type = other RNA
  modified_base 1: mod_base = OTHER; note 5'-(E)-vinylphosphonate-2'-O-methyladenosine-3'-phosphoroth ioate
  modified_base 2: mod_base = OTHER; note = 2'-fluorocytidine-3'-phosphorothioate
  modified_base 3: mod_base = OTHER; note = 2'-O-methyladenosine-3'-phosphate
  modified_base 4: mod_base = OTHER; note = 2'-O-methyladenosine-3'-phosphate
  modified_base 5: mod_base = OTHER; note = 2'-O-methyladenosine-3'-phosphate
  modified_base 6: mod_base = OTHER; note = 2'-fluoroadenosine-3'-phosphate
  modified_base 7: mod_base = OTHER; note = 2'-O-methylguanosine-3'-phosphate
  modified_base 8: mod_base = OTHER; note = 2'-O-methylcytidine-3'-phosphate
  modified_base 9: mod_base = OTHER; note = 2'-O-methyladenosine-3'-phosphate
  modified_base 10: mod_base = OTHER; note = 2'-O-methyladenosine-3'-phosphate
  modified_base 11: mod_base = OTHER; note = 2'-O-methyladenosine-3'-phosphate
  modified_base 12: mod_base = OTHER; note = 2'-O-methyladenosine-3'-phosphate
  modified_base 13: mod_base = OTHER; note = 2'-O-methylcytidine-3'-phosphate
  modified_base 14: mod_base = OTHER; note = 2'-fluoroadenosine-3'-phosphate
  modified_base 15: mod_base = OTHER; note = 2'-O-methylguanosine-3'-phosphate
  modified_base 16: mod_base = OTHER; note = 2'-fluoroguanosine-3'-phosphate
  modified_base 17: mod_base = OTHER; note = 2'-O-methyluridine-3'-phosphate
  modified_base 18: mod_base = OTHER; note = 2'-O-methylcytidine-3'-phosphate
  modified_base 19: mod_base = OTHER; note = 2'-O-methyluridine-3'-phosphate
  modified_base 20: mod_base = OTHER; note = 2'-O-methyladenosine-3'-phosphate
  modified_base 21: mod_base = OTHER; note = 2'-O-methylguanosine-3'-phosphorothioate
  modified_base 22: mod_base = OTHER; note = 2'-O-methyladenosine-3'-phosphorothioate
  modified_base 23: mod_base = OTHER; note = 2'-O-methyladenosine
acaaaagcaaaacaggtctagaa

SEQ ID NO: 970 - RNA, 23 nt, synthetic construct
  source 1..23: mol_type = other RNA
  modified_base 1: mod_base = OTHER; note 5'-(E)-vinylphosphonate-2'-O-methyladenosine-3'-phosphoroth ioate
  modified_base 2: mod_base = OTHER; note = 2'-fluorocytidine-3'-phosphorothioate
  modified_base 3: mod_base = OTHER; note = 2'-O-methyladenosine-3'-phosphate
  modified_base 4: mod_base = OTHER; note = 2'-O-methyladenosine-3'-phosphate
  modified_base 5: mod_base = OTHER; note = 2'-O-methyladenosine-3'-phosphate
  modified_base 6: mod_base = OTHER; note = 2'-fluoroadenosine-3'-phosphate
  modified_base 7: mod_base = OTHER; note = 2'-O-methylguanosine-3'-phosphate
  modified_base 8: mod_base = OTHER; note = 2'-O-methylcytidine-3'-phosphate
  modified_base 9: mod_base = OTHER; note = 2'-O-methyladenosine-3'-phosphate
  modified_base 10: mod_base = OTHER; note = 2'-O-methyladenosine-3'-phosphate
  modified_base 11: mod_base = OTHER; note = 2'-O-methyladenosine-3'-phosphate
  modified_base 12: mod_base = OTHER; note = 2'-O-methyladenosine-3'-phosphate
  modified_base 13: mod_base = OTHER; note = 2'-O-methylcytidine-3'-phosphate
  modified_base 14: mod_base = OTHER; note = 2'-fluoroadenosine-3'-phosphate
  modified_base 15: mod_base = OTHER; note = 2'-O-methylguanosine-3'-phosphate
  modified_base 16: mod_base = OTHER; note = 2'-fluoroguanosine-3'-phosphate
  modified_base 17: mod_base = OTHER; note = 2'-O-methyluridine-3'-phosphate
  modified_base 18: mod_base = OTHER; note = 2'-O-methylcytidine-3'-phosphate
  modified_base 19: mod_base = OTHER; note = 2'-O-methyluridine-3'-phosphate
  modified_base 20: mod_base = OTHER; note = 2'-O-methyladenosine-3'-phosphate
  modified_base 21: mod_base = OTHER; note = 2'-O-methylguanosine-3'-phosphorothioate
  modified_base 22: mod_base = OTHER; note = 2'-O-methyladenosine-3'-phosphorothioate
  modified_base 23: mod_base = OTHER; note = 2'-O-methyladenosine
acaaaagcaaaacaggtctagaa

SEQ ID NO: 971 - RNA, 23 nt, synthetic construct
  source 1..23: mol_type = other RNA
  modified_base 1: mod_base = OTHER; note = 2'-O-methyladenosine-3'-phosphorothioate
  modified_base 2: mod_base = OTHER; note = 2'-fluorocytidine-3'-phosphorothioate
  modified_base 3: mod_base = OTHER; note = 2'-O-methyladenosine-3'-phosphate
  modified_base 4: mod_base = OTHER; note = 2'-O-methyladenosine-3'-phosphate
  modified_base 5: mod_base = OTHER; note = 2'-O-methyladenosine-3'-phosphate
  modified_base 6: mod_base = OTHER; note = 2'-fluoroadenosine-3'-phosphate
  modified_base 7: mod_base = OTHER; note = 2'-O-methylguanosine-3'-phosphate
  modified_base 8: mod_base = OTHER; note = 2'-O-methylcytidine-3'-phosphate
  modified_base 9: mod_base = OTHER; note = 2'-O-methyladenosine-3'-phosphate
  modified_base 10: mod_base = OTHER; note = 2'-O-methyladenosine-3'-phosphate
  modified_base 11: mod_base = OTHER; note = 2'-O-methyladenosine-3'-phosphate
  modified_base 12: mod_base = OTHER; note = 2'-O-methyladenosine-3'-phosphate
  modified_base 13: mod_base = OTHER; note = 2'-O-methylcytidine-3'-phosphate
  modified_base 14: mod_base = OTHER; note = 2'-fluoroadenosine-3'-phosphate
  modified_base 15: mod_base = OTHER; note = 2'-O-methylguanosine-3'-phosphate
  modified_base 16: mod_base = OTHER; note = 2'-fluoroguanosine-3'-phosphate
  modified_base 17: mod_base = OTHER; note = 2'-O-methyluridine-3'-phosphate
  modified_base 18: mod_base = OTHER; note = 2'-O-methylcytidine-3'-phosphate
  modified_base 19: mod_base = OTHER; note = 2'-O-methyluridine-3'-phosphate
  modified_base 20: mod_base = OTHER; note = 2'-O-methyladenosine-3'-phosphate
  modified_base 21: mod_base = OTHER; note = 2'-O-methylguanosine-3'-phosphorothioate
  modified_base 22: mod_base = OTHER; note = 2'-O-methyladenosine-3'-phosphorothioate
  modified_base 23: mod_base = OTHER; note = 2'-O-methyladenosine
acaaaagcaaaacaggtctagaa

SEQ ID NO: 972 - RNA, 23 nt, synthetic construct
  source 1..23: mol_type = other RNA
  modified_base 1: mod_base = OTHER; note = 2'-O-methyladenosine-3'-phosphorothioate
  modified_base 2: mod_base = OTHER; note = 2'-fluorocytidine-3'-phosphorothioate
  modified_base 3: mod_base = OTHER; note = 2'-O-methyladenosine-3'-phosphate
  modified_base 4: mod_base = OTHER; note = 2'-O-methyladenosine-3'-phosphate
  modified_base 5: mod_base = OTHER; note = 2'-O-methyladenosine-3'-phosphate
  modified_base 6: mod_base = OTHER; note = 2'-fluoroadenosine-3'-phosphate
  modified_base 7: mod_base = OTHER; note = 2'-O-methylguanosine-3'-phosphate
  modified_base 8: mod_base = OTHER; note = 2'-O-methylcytidine-3'-phosphate
  modified_base 9: mod_base = OTHER; note = 2'-O-methyladenosine-3'-phosphate
  modified_base 10: mod_base = OTHER; note = 2'-O-methyladenosine-3'-phosphate
  modified_base 11: mod_base = OTHER; note = 2'-O-methyladenosine-3'-phosphate
  modified_base 12: mod_base = OTHER; note = 2'-O-methyladenosine-3'-phosphate
  modified_base 13: mod_base = OTHER; note = 2'-O-methylcytidine-3'-phosphate
  modified_base 14: mod_base = OTHER; note = 2'-fluoroadenosine-3'-phosphate
  modified_base 15: mod_base = OTHER; note = 2'-O-methylguanosine-3'-phosphate
  modified_base 16: mod_base = OTHER; note = 2'-fluoroguanosine-3'-phosphate
  modified_base 17: mod_base = OTHER; note = 2'-O-methyluridine-3'-phosphate
  modified_base 18: mod_base = OTHER; note = 2'-O-methylcytidine-3'-phosphate
  modified_base 19: mod_base = OTHER; note = 2'-O-methyluridine-3'-phosphate
  modified_base 20: mod_base = OTHER; note = 2'-O-methyladenosine-3'-phosphate
  modified_base 21: mod_base = OTHER; note = 2'-O-methylguanosine-3'-phosphorothioate
  modified_base 22: mod_base = OTHER; note = 2'-O-methyladenosine-3'-phosphorothioate
  modified_base 23: mod_base = OTHER; note = 2'-O-methyladenosine
acaaaagcaaaacaggtctagaa

SEQ ID NO: 973 - RNA, 23 nt, synthetic construct
  source 1..23: mol_type = other RNA
  modified_base 1: mod_base = OTHER; note 5'-(E)-vinylphosphonate-2'-O-methyladenosine-3'-phosphoroth ioate
  modified_base 2: mod_base = OTHER; note = 2'-fluorocytidine-3'-phosphorothioate
  modified_base 3: mod_base = OTHER; note = Adenine threose nucleic acid-2'-phosphate
  modified_base 4: mod_base = OTHER; note = 2'-O-methyladenosine-3'-phosphate
  modified_base 5: mod_base = OTHER; note = 2'-O-methyladenosine-3'-phosphate
  modified_base 6: mod_base = OTHER; note = 2'-fluoroadenosine-3'-phosphate
  modified_base 7: mod_base = OTHER; note = 2'-O-methylguanosine-3'-phosphate
  modified_base 8: mod_base = OTHER; note = 2'-O-methylcytidine-3'-phosphate
  modified_base 9: mod_base = OTHER; note = 2'-O-methyladenosine-3'-phosphate
  modified_base 10: mod_base = OTHER; note = 2'-O-methyladenosine-3'-phosphate
  modified_base 11: mod_base = OTHER; note = 2'-O-methyladenosine-3'-phosphate
  modified_base 12: mod_base = OTHER; note = 2'-O-methyladenosine-3'-phosphate
  modified_base 13: mod_base = OTHER; note = 2'-O-methylcytidine-3'-phosphate
  modified_base 14: mod_base = OTHER; note = 2'-fluoroadenosine-3'-phosphate
  modified_base 15: mod_base = OTHER; note = 2'-O-methylguanosine-3'-phosphate
  modified_base 16: mod_base = OTHER; note = 2'-fluoroguanosine-3'-phosphate
  modified_base 17: mod_base = OTHER; note = 2'-O-methyluridine-3'-phosphate
  modified_base 18: mod_base = OTHER; note = 2'-O-methylcytidine-3'-phosphate
  modified_base 19: mod_base = OTHER; note = 2'-O-methyluridine-3'-phosphate
  modified_base 20: mod_base = OTHER; note = 2'-O-methyladenosine-3'-phosphate
  modified_base 21: mod_base = OTHER; note = 2'-O-methylguanosine-3'-phosphorothioate
  modified_base 22: mod_base = OTHER; note = 2'-O-methyladenosine-3'-phosphorothioate
  modified_base 23: mod_base = OTHER; note = 2'-O-methyladenosine
acaaaagcaaaacaggtctagaa

SEQ ID NO: 974 - RNA, 23 nt, synthetic construct
  source 1..23: mol_type = other RNA
  modified_base 1: mod_base = OTHER; note 5'-(E)-vinylphosphonate-2'-O-methyladenosine-3'-phosphoroth ioate
  modified_base 2: mod_base = OTHER; note = 2'-fluorocytidine-3'-phosphorothioate
  modified_base 3: mod_base = OTHER; note = Adenine threose nucleic acid-2'-phosphate
  modified_base 4: mod_base = OTHER; note = 2'-O-methyladenosine-3'-phosphate
  modified_base 5: mod_base = OTHER; note = 2'-O-methyladenosine-3'-phosphate
  modified_base 6: mod_base = OTHER; note = 2'-fluoroadenosine-3'-phosphate
  modified_base 7: mod_base = OTHER; note = 2'-O-methylguanosine-3'-phosphate
  modified_base 8: mod_base = OTHER; note = 2'-O-methylcytidine-3'-phosphate
  modified_base 9: mod_base = OTHER; note = 2'-O-methyladenosine-3'-phosphate
  modified_base 10: mod_base = OTHER; note = 2'-O-methyladenosine-3'-phosphate
  modified_base 11: mod_base = OTHER; note = 2'-O-methyladenosine-3'-phosphate
  modified_base 12: mod_base = OTHER; note = 2'-O-methyladenosine-3'-phosphate
  modified_base 13: mod_base = OTHER; note = 2'-O-methylcytidine-3'-phosphate
  modified_base 14: mod_base = OTHER; note = 2'-fluoroadenosine-3'-phosphate
  modified_base 15: mod_base = OTHER; note = 2'-O-methylguanosine-3'-phosphate
  modified_base 16: mod_base = OTHER; note = 2'-fluoroguanosine-3'-phosphate
  modified_base 17: mod_base = OTHER; note = 2'-O-methyluridine-3'-phosphate
  modified_base 18: mod_base = OTHER; note = 2'-O-methylcytidine-3'-phosphate
  modified_base 19: mod_base = OTHER; note = 2'-O-methyluridine-3'-phosphate
  modified_base 20: mod_base = OTHER; note = 2'-O-methyladenosine-3'-phosphate
  modified_base 21: mod_base = OTHER; note = 2'-O-methylguanosine-3'-phosphorothioate
  modified_base 22: mod_base = OTHER; note = 2'-O-methyladenosine-3'-phosphorothioate
  modified_base 23: mod_base = OTHER; note = 2'-O-methyladenosine
acaaaagcaaaacaggtctagaa

SEQ ID NO: 975 - RNA, 23 nt, synthetic construct
  source 1..23: mol_type = other RNA
  modified_base 1: mod_base = OTHER; note 5'-(E)-vinylphosphonate-2'-O-methyladenosine-3'-phosphoroth ioate
  modified_base 2: mod_base = OTHER; note = 2'-fluorocytidine-3'-phosphorothioate
  modified_base 3: mod_base = OTHER; note = 2'-O-methyladenosine-3'-phosphate
  modified_base 4: mod_base = OTHER; note = 2'-O-methyladenosine-3'-phosphate
  modified_base 5: mod_base = OTHER; note = 2'-O-methyladenosine-3'-phosphate
  modified_base 6: mod_base = OTHER; note = 2'-fluoroadenosine-3'-phosphate
  modified_base 7: mod_base = OTHER; note = 2'-O-methylguanosine-3'-phosphate
  modified_base 8: mod_base = OTHER; note = 2'-O-methylcytidine-3'-phosphate
  modified_base 9: mod_base = OTHER; note = 2'-O-methyladenosine-3'-phosphate
  modified_base 10: mod_base = OTHER; note = 2'-O-methyladenosine-3'-phosphate
  modified_base 11: mod_base = OTHER; note = 2'-O-methyladenosine-3'-phosphate
  modified_base 12: mod_base = OTHER; note = 2'-O-methyladenosine-3'-phosphate
  modified_base 13: mod_base = OTHER; note = 2'-O-methylcytidine-3'-phosphate
  modified_base 14: mod_base = OTHER; note = 2'-fluoroadenosine-3'-phosphate
  modified_base 15: mod_base = OTHER; note = 2'-O-methylguanosine-3'-phosphate
  modified_base 16: mod_base = OTHER; note = 2'-fluoroguanosine-3'-phosphate
  modified_base 17: mod_base = OTHER; note = 2'-O-methyluridine-3'-phosphate
  modified_base 18: mod_base = OTHER; note = 2'-O-methylcytidine-3'-phosphate
  modified_base 19: mod_base = OTHER; note = 2'-O-methyluridine-3'-phosphate
  modified_base 20: mod_base = OTHER; note = 2'-O-methyladenosine-3'-phosphate
  modified_base 21: mod_base = OTHER; note = 2'-O-methylguanosine-3'-phosphorothioate
  modified_base 22: mod_base = OTHER; note = 2'-O-methyladenosine-3'-phosphorothioate
  modified_base 23: mod_base = OTHER; note = 2'-O-methyladenosine
acaaaagcaaaacaggtctagaa

SEQ ID NO: 976 - RNA, 23 nt, synthetic construct
  source 1..23: mol_type = other RNA
  modified_base 1: mod_base = OTHER; note 5'-(E)-vinylphosphonate-2'-O-methyladenosine-3'-phosphoroth ioate
  modified_base 2: mod_base = OTHER; note = 2'-fluorocytidine-3'-phosphorothioate
  modified_base 3: mod_base = OTHER; note = 2'-O-methyladenosine-3'-phosphate
  modified_base 4: mod_base = OTHER; note = 2'-O-methyladenosine-3'-phosphate
  modified_base 5: mod_base = OTHER; note = 2'-O-methyladenosine-3'-phosphate
  modified_base 6: mod_base = OTHER; note = 2'-fluoroadenosine-3'-phosphate
  modified_base 7: mod_base = OTHER; note = 2'-O-methylguanosine-3'-phosphate
  modified_base 8: mod_base = OTHER; note = 2'-O-methylcytidine-3'-phosphate
  modified_base 9: mod_base = OTHER; note = 2'-O-methyladenosine-3'-phosphate
  modified_base 10: mod_base = OTHER; note = 2'-O-methyladenosine-3'-phosphate
  modified_base 11: mod_base = OTHER; note = 2'-O-methyladenosine-3'-phosphate
  modified_base 12: mod_base = OTHER; note = 2'-O-methyladenosine-3'-phosphate
  modified_base 13: mod_base = OTHER; note = 2'-O-methylcytidine-3'-phosphate
  modified_base 14: mod_base = OTHER; note = 2'-fluoroadenosine-3'-phosphate
  modified_base 15: mod_base = OTHER; note = 2'-O-methylguanosine-3'-phosphate
  modified_base 16: mod_base = OTHER; note = 2'-fluoroguanosine-3'-phosphate
  modified_base 17: mod_base = OTHER; note = 2'-O-methyluridine-3'-phosphate
  modified_base 18: mod_base = OTHER; note = 2'-O-methylcytidine-3'-phosphate
  modified_base 19: mod_base = OTHER; note = 2'-O-methyluridine-3'-phosphate
  modified_base 20: mod_base = OTHER; note = 2'-O-methyladenosine-3'-phosphate
  modified_base 21: mod_base = OTHER; note = 2'-O-methylguanosine-3'-phosphorothioate
  modified_base 22: mod_base = OTHER; note = 2'-O-methyladenosine-3'-phosphorothioate
  modified_base 23: mod_base = OTHER; note = 2'-O-methyladenosine
acaaaagcaaaacaggtctagaa

SEQ ID NO: 977 - RNA, 23 nt, synthetic construct
  source 1..23: mol_type = other RNA
  modified_base 1: mod_base = OTHER; note 5'-(E)-vinylphosphonate-2'-O-methyladenosine-3'-phosphoroth ioate
  modified_base 2: mod_base = OTHER; note = 2'-fluorocytidine-3'-phosphorothioate
  modified_base 3: mod_base = OTHER; note = Adenine threose nucleic acid-2'-phosphate
  modified_base 4: mod_base = OTHER; note = 2'-O-methyladenosine-3'-phosphate
  modified_base 5: mod_base = OTHER; note = 2'-O-methyladenosine-3'-phosphate
  modified_base 6: mod_base = OTHER; note = 2'-fluoroadenosine-3'-phosphate
  modified_base 7: mod_base = OTHER; note = 2'-O-methylguanosine-3'-phosphate
  modified_base 8: mod_base = OTHER; note = 2'-O-methylcytidine-3'-phosphate
  modified_base 9: mod_base = OTHER; note = 2'-O-methyladenosine-3'-phosphate
  modified_base 10: mod_base = OTHER; note = 2'-O-methyladenosine-3'-phosphate
  modified_base 11: mod_base = OTHER; note = 2'-O-methyladenosine-3'-phosphate
  modified_base 12: mod_base = OTHER; note = 2'-O-methyladenosine-3'-phosphate
  modified_base 13: mod_base = OTHER; note = 2'-O-methylcytidine-3'-phosphate
  modified_base 14: mod_base = OTHER; note = 2'-fluoroadenosine-3'-phosphate
  modified_base 15: mod_base = OTHER; note = 2'-O-methylguanosine-3'-phosphate
  modified_base 16: mod_base = OTHER; note = 2'-fluoroguanosine-3'-phosphate
  modified_base 17: mod_base = OTHER; note = 2'-O-methyluridine-3'-phosphate
  modified_base 18: mod_base = OTHER; note = 2'-O-methylcytidine-3'-phosphate
  modified_base 19: mod_base = OTHER; note = 2'-O-methyluridine-3'-phosphate
  modified_base 20: mod_base = OTHER; note = 2'-O-methyladenosine-3'-phosphate
  modified_base 21: mod_base = OTHER; note = 2'-O-methylguanosine-3'-phosphorothioate
  modified_base 22: mod_base = OTHER; note = 2'-O-methyladenosine-3'-phosphorothioate
  modified_base 23: mod_base = OTHER; note = 2'-O-methyladenosine
acaaaagcaaaacaggtctagaa

SEQ ID NO: 978 - RNA, 23 nt, synthetic construct
  source 1..23: mol_type = other RNA
  modified_base 1: mod_base = OTHER; note 5'-(E)-vinylphosphonate-2'-O-methyladenosine-3'-phosphoroth ioate
  modified_base 2: mod_base = OTHER; note = 2'-fluorocytidine-3'-phosphorothioate
  modified_base 3: mod_base = OTHER; note = Adenine threose nucleic acid-2'-phosphate
  modified_base 4: mod_base = OTHER; note = 2'-O-methyladenosine-3'-phosphate
  modified_base 5: mod_base = OTHER; note = 2'-O-methyladenosine-3'-phosphate
  modified_base 6: mod_base = OTHER; note = 2'-fluoroadenosine-3'-phosphate
  modified_base 7: mod_base = OTHER; note = 2'-O-methylguanosine-3'-phosphate
  modified_base 8: mod_base = OTHER; note = 2'-O-methylcytidine-3'-phosphate
  modified_base 9: mod_base = OTHER; note = 2'-O-methyladenosine-3'-phosphate
  modified_base 10: mod_base = OTHER; note = 2'-O-methyladenosine-3'-phosphate
  modified_base 11: mod_base = OTHER; note = 2'-O-methyladenosine-3'-phosphate
  modified_base 12: mod_base = OTHER; note = 2'-O-methyladenosine-3'-phosphate
  modified_base 13: mod_base = OTHER; note = 2'-O-methylcytidine-3'-phosphate
  modified_base 14: mod_base = OTHER; note = 2'-fluoroadenosine-3'-phosphate
  modified_base 15: mod_base = OTHER; note = 2'-O-methylguanosine-3'-phosphate
  modified_base 16: mod_base = OTHER; note = 2'-fluoroguanosine-3'-phosphate
  modified_base 17: mod_base = OTHER; note = 2'-O-methyluridine-3'-phosphate
  modified_base 18: mod_base = OTHER; note = 2'-O-methylcytidine-3'-phosphate
  modified_base 19: mod_base = OTHER; note = 2'-O-methyluridine-3'-phosphate
  modified_base 20: mod_base = OTHER; note = 2'-O-methyladenosine-3'-phosphate
  modified_base 21: mod_base = OTHER; note = 2'-O-methylguanosine-3'-phosphorothioate
  modified_base 22: mod_base = OTHER; note = 2'-O-methyladenosine-3'-phosphorothioate
  modified_base 23: mod_base = OTHER; note = 2'-O-methyladenosine
acaaaagcaaaacaggtctagaa

SEQ ID NO: 979 - RNA, 23 nt, synthetic construct
  source 1..23: mol_type = other RNA
  modified_base 1: mod_base = OTHER; note 5'-(E)-vinylphosphonate-2'-O-methyluridine-3'-phosphorothio ate
  modified_base 2: mod_base = OTHER; note = 2'-fluoroadenosine-3'-phosphorothioate
  modified_base 3: mod_base = OTHER; note = 2'-O-methyladenosine-3'-phosphate
  modified_base 4: mod_base = OTHER; note = 2'-O-methyladenosine-3'-phosphate
  modified_base 5: mod_base = OTHER; note = 2'-O-methyladenosine-3'-phosphate
  modified_base 6: mod_base = OTHER; note = 2'-fluoroguanosine-3'-phosphate
  modified_base 7: mod_base = OTHER; note = 2'-O-methyladenosine-3'-phosphate
  modified_base 8: mod_base = OTHER; note = 2'-O-methyluridine-3'-phosphate
  modified_base 9: mod_base = OTHER; note = 2'-O-methyladenosine-3'-phosphate
  modified_base 10: mod_base = OTHER; note = 2'-O-methyladenosine-3'-phosphate
  modified_base 11: mod_base = OTHER; note = 2'-O-methyladenosine-3'-phosphate
  modified_base 12: mod_base = OTHER; note = 2'-O-methyluridine-3'-phosphate
  modified_base 13: mod_base = OTHER; note = 2'-O-methylguanosine-3'-phosphate
  modified_base 14: mod_base = OTHER; note = 2'-fluorouridine-3'-phosphate
  modified_base 15: mod_base = OTHER; note = 2'-O-methylcytidine-3'-phosphate
  modified_base 16: mod_base = OTHER; note = 2'-fluorouridine-3'-phosphate
  modified_base 17: mod_base = OTHER; note = 2'-O-methylguanosine-3'-phosphate
  modified_base 18: mod_base = OTHER; note = 2'-O-methylcytidine-3'-phosphate
  modified_base 19: mod_base = OTHER; note = 2'-O-methyluridine-3'-phosphate
  modified_base 20: mod_base = OTHER; note = 2'-O-methyluridine-3'-phosphate
  modified_base 21: mod_base = OTHER; note = 2'-O-methylguanosine-3'-phosphorothioate
  modified_base 22: mod_base = OTHER; note = 2'-O-methylcytidine-3'-phosphorothioate
  modified_base 23: mod_base = OTHER; note = 2'-O-methyluridine
taaaagataaatgtctgcttgct

SEQ ID NO: 980 - RNA, 23 nt, synthetic construct
  source 1..23: mol_type = other RNA
  modified_base 1: mod_base = OTHER; note 5'-(E)-vinylphosphonate-2'-O-methyladenosine-3'-phosphoroth ioate
  modified_base 2: mod_base = OTHER; note = 2'-fluoroadenosine-3'-phosphorothioate
  modified_base 3: mod_base = OTHER; note = 2'-O-methyladenosine-3'-phosphate
  modified_base 4: mod_base = OTHER; note = 2'-O-methyladenosine-3'-phosphate
  modified_base 5: mod_base = OTHER; note = 2'-O-methylcytidine-3'-phosphate
  modified_base 6: mod_base = OTHER; note = 2'-fluoroadenosine-3'-phosphate
  modified_base 7: mod_base = OTHER; note = 2'-O-methylguanosine-3'-phosphate
  modified_base 8: mod_base = OTHER; note = 2'-O-methylguanosine-3'-phosphate
  modified_base 9: mod_base = OTHER; note = 2'-O-methyluridine-3'-phosphate
  modified_base 10: mod_base = OTHER; note = 2'-O-methylcytidine-3'-phosphate
  modified_base 11: mod_base = OTHER; note = 2'-O-methyluridine-3'-phosphate
  modified_base 12: mod_base = OTHER; note = 2'-O-methyladenosine-3'-phosphate
  modified_base 13: mod_base = OTHER; note = 2'-O-methylguanosine-3'-phosphate
  modified_base 14: mod_base = OTHER; note = 2'-fluoroadenosine-3'-phosphate
  modified_base 15: mod_base = OTHER; note = 2'-O-methyladenosine-3'-phosphate
  modified_base 16: mod_base = OTHER; note = 2'-fluoroadenosine-3'-phosphate
  modified_base 17: mod_base = OTHER; note = 2'-O-methyladenosine-3'-phosphate
  modified_base 18: mod_base = OTHER; note = 2'-O-methylguanosine-3'-phosphate
  modified_base 19: mod_base = OTHER; note = 2'-O-methyluridine-3'-phosphate
  modified_base 20: mod_base = OTHER; note = 2'-O-methyluridine-3'-phosphate
  modified_base 21: mod_base = OTHER; note = 2'-O-methylguanosine-3'-phosphorothioate
  modified_base 22: mod_base = OTHER; note = 2'-O-methylguanosine-3'-phosphorothioate
  modified_base 23: mod_base = OTHER; note = 2'-O-methylcytidine
aaaacaggtctagaaaagttggc

SEQ ID NO: 981 - RNA, 23 nt, synthetic construct
  source 1..23: mol_type = other RNA
  modified_base 1: mod_base = OTHER; note 5'-(E)-vinylphosphonate-2'-O-methyladenosine-3'-phosphoroth ioate
  modified_base 2: mod_base = OTHER; note = 2'-fluorouridine-3'-phosphorothioate
  modified_base 3: mod_base = OTHER; note = 2'-O-methyladenosine-3'-phosphate
  modified_base 4: mod_base = OTHER; note = 2'-O-methyluridine-3'-phosphate
  modified_base 5: mod_base = OTHER; note = 2'-O-methylcytidine-3'-phosphate
  modified_base 6: mod_base = OTHER; note = 2'-fluorouridine-3'-phosphate
  modified_base 7: mod_base = OTHER; note = 2'-O-methyluridine-3'-phosphate
  modified_base 8: mod_base = OTHER; note = 2'-O-methylcytidine-3'-phosphate
  modified_base 9: mod_base = OTHER; note = 2'-O-methyladenosine-3'-phosphate
  modified_base 10: mod_base = OTHER; note = 2'-O-methyladenosine-3'-phosphate
  modified_base 11: mod_base = OTHER; note = 2'-O-methylguanosine-3'-phosphate
  modified_base 12: mod_base = OTHER; note = 2'-O-methyluridine-3'-phosphate
  modified_base 13: mod_base = OTHER; note = 2'-O-methyluridine-3'-phosphate
  modified_base 14: mod_base = OTHER; note = 2'-fluoroadenosine-3'-phosphate
  modified_base 15: mod_base = OTHER; note = 2'-O-methylcytidine-3'-phosphate
  modified_base 16: mod_base = OTHER; note = 2'-fluoroadenosine-3'-phosphate
  modified_base 17: mod_base = OTHER; note = 2'-O-methyladenosine-3'-phosphate
  modified_base 18: mod_base = OTHER; note = 2'-O-methyladenosine-3'-phosphate
  modified_base 19: mod_base = OTHER; note = 2'-O-methyladenosine-3'-phosphate
  modified_base 20: mod_base = OTHER; note = 2'-O-methylguanosine-3'-phosphate
  modified_base 21: mod_base = OTHER; note = 2'-O-methylcytidine-3'-phosphorothioate
  modified_base 22: mod_base = OTHER; note = 2'-O-methyladenosine-3'-phosphorothioate
  modified_base 23: mod_base = OTHER; note = 2'-O-methyladenosine
atatcttcaagttacaaaagcaa

SEQ ID NO: 982 - RNA, 23 nt, synthetic construct
  source 1..23: mol_type = other RNA
  modified_base 1: mod_base = OTHER; note 5'-(E)-vinylphosphonate-2'-O-methyluridine-3'-phosphorothio ate
  modified_base 2: mod_base = OTHER; note = 2'-fluorouridine-3'-phosphorothioate
  modified_base 3: mod_base = OTHER; note = 2'-O-methylcytidine-3'-phosphate
  modified_base 4: mod_base = OTHER; note = 2'-O-methylguanosine-3'-phosphate
  modified_base 5: mod_base = OTHER; note = 2'-O-methyladenosine-3'-phosphate
  modified_base 6: mod_base = OTHER; note = 2'-fluorocytidine-3'-phosphate
  modified_base 7: mod_base = OTHER; note = 2'-O-methyladenosine-3'-phosphate
  modified_base 8: mod_base = OTHER; note = 2'-O-methyluridine-3'-phosphate
  modified_base 9: mod_base = OTHER; note = 2'-O-methylguanosine-3'-phosphate
  modified_base 10: mod_base = OTHER; note = 2'-O-methylguanosine-3'-phosphate
  modified_base 11: mod_base = OTHER; note = 2'-O-methylguanosine-3'-phosphate
  modified_base 12: mod_base = OTHER; note = 2'-O-methylguanosine-3'-phosphate
  modified_base 13: mod_base = OTHER; note = 2'-O-methylcytidine-3'-phosphate
  modified_base 14: mod_base = OTHER; note = 2'-fluoroadenosine-3'-phosphate
  modified_base 15: mod_base = OTHER; note = 2'-O-methyladenosine-3'-phosphate
  modified_base 16: mod_base = OTHER; note = 2'-fluorocytidine-3'-phosphate
  modified_base 17: mod_base = OTHER; note = 2'-O-methyluridine-3'-phosphate
  modified_base 18: mod_base = OTHER; note = 2'-O-methyluridine-3'-phosphate
  modified_base 19: mod_base = OTHER; note = 2'-O-methylcytidine-3'-phosphate
  modified_base 20: mod_base = OTHER; note = 2'-O-methyladenosine-3'-phosphate
  modified_base 21: mod_base = OTHER; note = 2'-O-methyladenosine-3'-phosphorothioate
  modified_base 22: mod_base = OTHER; note = 2'-O-methylguanosine-3'-phosphorothioate
  modified_base 23: mod_base = OTHER; note = 2'-O-methylguanosine
ttcgacatggggcaacttcaagg

SEQ ID NO: 983 - RNA, 23 nt, synthetic construct
  source 1..23: mol_type = other RNA
  modified_base 1: mod_base = OTHER; note 5'-(E)-vinylphosphonate-2'-O-methyladenosine-3'-phosphoroth ioate
  modified_base 2: mod_base = OTHER; note = 2'-fluorouridine-3'-phosphorothioate
  modified_base 3: mod_base = OTHER; note = 2'-O-methyladenosine-3'-phosphate
  modified_base 4: mod_base = OTHER; note = 2'-O-methyladenosine-3'-phosphate
  modified_base 5: mod_base = OTHER; note = 2'-O-methyladenosine-3'-phosphate
  modified_base 6: mod_base = OTHER; note = 2'-fluorocytidine-3'-phosphate
  modified_base 7: mod_base = OTHER; note = 2'-O-methyluridine-3'-phosphate
  modified_base 8: mod_base = OTHER; note = 2'-O-methylcytidine-3'-phosphate
  modified_base 9: mod_base = OTHER; note = 2'-O-methylcytidine-3'-phosphate
  modified_base 10: mod_base = OTHER; note = 2'-O-methyladenosine-3'-phosphate
  modified_base 11: mod_base = OTHER; note = 2'-O-methylguanosine-3'-phosphate
  modified_base 12: mod_base = OTHER; note = 2'-O-methylguanosine-3'-phosphate
  modified_base 13: mod_base = OTHER; note = 2'-O-methylcytidine-3'-phosphate
  modified_base 14: mod_base = OTHER; note = 2'-fluorocytidine-3'-phosphate
  modified_base 15: mod_base = OTHER; note = 2'-O-methyluridine-3'-phosphate
  modified_base 16: mod_base = OTHER; note = 2'-fluoroadenosine-3'-phosphate
  modified_base 17: mod_base = OTHER; note = 2'-O-methyluridine-3'-phosphate
  modified_base 18: mod_base = OTHER; note = 2'-O-methylguanosine-3'-phosphate
  modified_base 19: mod_base = OTHER; note = 2'-O-methyladenosine-3'-phosphate
  modified_base 20: mod_base = OTHER; note = 2'-O-methylguanosine-3'-phosphate
  modified_base 21: mod_base = OTHER; note = 2'-O-methylguanosine-3'-phosphorothioate
  modified_base 22: mod_base = OTHER; note = 2'-O-methylguanosine-3'-phosphorothioate
  modified_base 23: mod_base = OTHER; note = 2'-O-methyluridine
ataaactccaggcctatgagggt

SEQ ID NO: 984 - RNA, 23 nt, synthetic construct
  source 1..23: mol_type = other RNA
  modified_base 1: mod_base = OTHER; note 5'-(E)-vinylphosphonate-2'-O-methyladenosine-3'-phosphoroth ioate
  modified_base 2: mod_base = OTHER; note = 2'-fluoroadenosine-3'-phosphorothioate
  modified_base 3: mod_base = OTHER; note = 2'-O-methylguanosine-3'-phosphate
  modified_base 4: mod_base = OTHER; note = 2'-O-methyluridine-3'-phosphate
  modified_base 5: mod_base = OTHER; note = 2'-O-methyladenosine-3'-phosphate
  modified_base 6: mod_base = OTHER; note = 2'-fluoroadenosine-3'-phosphate
  modified_base 7: mod_base = OTHER; note = 2'-O-methylguanosine-3'-phosphate
  modified_base 8: mod_base = OTHER; note = 2'-O-methyladenosine-3'-phosphate
  modified_base 9: mod_base = OTHER; note = 2'-O-methyladenosine-3'-phosphate
  modified_base 10: mod_base = OTHER; note = 2'-O-methylguanosine-3'-phosphate
  modified_base 11: mod_base = OTHER; note = 2'-O-methyladenosine-3'-phosphate
  modified_base 12: mod_base = OTHER; note = 2'-O-methylguanosine-3'-phosphate
  modified_base 13: mod_base = OTHER; note = 2'-O-methylguanosine-3'-phosphate
  modified_base 14: mod_base = OTHER; note = 2'-fluorocytidine-3'-phosphate
  modified_base 15: mod_base = OTHER; note = 2'-O-methyluridine-3'-phosphate
  modified_base 16: mod_base = OTHER; note = 2'-fluorouridine-3'-phosphate
  modified_base 17: mod_base = OTHER; note = 2'-O-methylguanosine-3'-phosphate
  modified_base 18: mod_base = OTHER; note = 2'-O-methylguanosine-3'-phosphate
  modified_base 19: mod_base = OTHER; note = 2'-O-methylcytidine-3'-phosphorothioate
  modified_base 20: mod_base = OTHER; note = 2'-O-methyluridine-3'-phosphorothioate
  modified_base 21: mod_base = OTHER; note = 2'-O-methyluridine-3'-phosphate
  modified_base 22: mod_base = OTHER; note = 2'-O-methylcytidine-3'-phosphate
  modified_base 23: mod_base = OTHER; note = 2'-O-methyladenosine
aagtaagaagaggcttggcttca

SEQ ID NO: 985 - RNA, 23 nt, synthetic construct
  source 1..23: mol_type = other RNA
  modified_base 1: mod_base = OTHER; note 5'-(E)-vinylphosphonate-2'-O-methyluridine-3'-phosphorothio ate
  modified_base 2: mod_base = OTHER; note = 2'-fluoroadenosine-3'-phosphorothioate
  modified_base 3: mod_base = OTHER; note = 2'-O-methyladenosine-3'-phosphate
  modified_base 4: mod_base = OTHER; note = 2'-O-methylguanosine-3'-phosphate
  modified_base 5: mod_base = OTHER; note = 2'-O-methyluridine-3'-phosphate
  modified_base 6: mod_base = OTHER; note = 2'-fluoroadenosine-3'-phosphate
  modified_base 7: mod_base = OTHER; note = 2'-O-methyladenosine-3'-phosphate
  modified_base 8: mod_base = OTHER; note = 2'-O-methylguanosine-3'-phosphate
  modified_base 9: mod_base = OTHER; note = 2'-O-methyladenosine-3'-phosphate
  modified_base 10: mod_base = OTHER; note = 2'-O-methyladenosine-3'-phosphate
  modified_base 11: mod_base = OTHER; note = 2'-O-methylguanosine-3'-phosphate
  modified_base 12: mod_base = OTHER; note = 2'-O-methyladenosine-3'-phosphate
  modified_base 13: mod_base = OTHER; note = 2'-O-methylguanosine-3'-phosphate
  modified_base 14: mod_base = OTHER; note = 2'-fluoroguanosine-3'-phosphate
  modified_base 15: mod_base = OTHER; note = 2'-O-methylcytidine-3'-phosphate
  modified_base 16: mod_base = OTHER; note = 2'-fluorouridine-3'-phosphate
  modified_base 17: mod_base = OTHER; note = 2'-O-methyluridine-3'-phosphate
  modified_base 18: mod_base = OTHER; note = 2'-O-methylguanosine-3'-phosphate
  modified_base 19: mod_base = OTHER; note = 2'-O-methylguanosine-3'-phosphate
  modified_base 20: mod_base = OTHER; note = 2'-O-methylcytidine-3'-phosphate
  modified_base 21: mod_base = OTHER; note = 2'-O-methyluridine-3'-phosphorothioate
  modified_base 22: mod_base = OTHER; note = 2'-O-methyluridine-3'-phosphorothioate
  modified_base 23: mod_base = OTHER; note = 2'-O-methylcytidine
taagtaagaagaggcttggcttc

SEQ ID NO: 986 - RNA, 23 nt, synthetic construct
  source 1..23: mol_type = other RNA
  modified_base 1: mod_base = OTHER; note 5'-(E)-vinylphosphonate-2'-O-methyladenosine-3'-phosphoroth ioate
  modified_base 2: mod_base = OTHER; note = 2'-fluoroadenosine-3'-phosphorothioate
  modified_base 3: mod_base = OTHER; note = 2'-O-methylguanosine-3'-phosphate
  modified_base 4: mod_base = OTHER; note = 2'-O-methylcytidine-3'-phosphate
  modified_base 5: mod_base = OTHER; note = 2'-O-methyladenosine-3'-phosphate
  modified_base 6: mod_base = OTHER; note = 2'-fluoroadenosine-3'-phosphate
  modified_base 7: mod_base = OTHER; note = 2'-O-methyladenosine-3'-phosphate
  modified_base 8: mod_base = OTHER; note = 2'-O-methyladenosine-3'-phosphate
  modified_base 9: mod_base = OTHER; note = 2'-O-methylcytidine-3'-phosphate
  modified_base 10: mod_base = OTHER; note = 2'-O-methyladenosine-3'-phosphate
  modified_base 11: mod_base = OTHER; note = 2'-O-methylguanosine-3'-phosphate
  modified_base 12: mod_base = OTHER; note = 2'-O-methylguanosine-3'-phosphate
  modified_base 13: mod_base = OTHER; note = 2'-O-methyluridine-3'-phosphate
  modified_base 14: mod_base = OTHER; note = 2'-fluorocytidine-3'-phosphate
  modified_base 15: mod_base = OTHER; note = 2'-O-methyluridine-3'-phosphate
  modified_base 16: mod_base = OTHER; note = 2'-fluoroadenosine-3'-phosphate
  modified_base 17: mod_base = OTHER; note = 2'-O-methylguanosine-3'-phosphate
  modified_base 18: mod_base = OTHER; note = 2'-O-methyladenosine-3'-phosphate
  modified_base 19: mod_base = OTHER; note = 2'-O-methyladenosine-3'-phosphorothioate
  modified_base 20: mod_base = OTHER; note = 2'-O-methyladenosine-3'-phosphorothioate
  modified_base 21: mod_base = OTHER; note = 2'-O-methyladenosine-3'-phosphate
  modified_base 22: mod_base = OTHER; note = 2'-O-methylguanosine-3'-phosphate
  modified_base 23: mod_base = OTHER; note = 2'-O-methyluridine
aagcaaaacaggtctagaaaagt

SEQ ID NO: 987 - RNA, 23 nt, synthetic construct
  source 1..23: mol_type = other RNA
  modified_base 1: mod_base = OTHER; note 5'-(E)-vinylphosphonate-2'-O-methyluridine-3'-phosphorothio ate
  modified_base 2: mod_base = OTHER; note = 2'-fluorouridine-3'-phosphorothioate
  modified_base 3: mod_base = OTHER; note = 2'-O-methyladenosine-3'-phosphate
  modified_base 4: mod_base = OTHER; note = 2'-O-methylcytidine-3'-phosphate
  modified_base 5: mod_base = OTHER; note = 2'-O-methyladenosine-3'-phosphate
  modified_base 6: mod_base = OTHER; note = 2'-fluoroadenosine-3'-phosphate
  modified_base 7: mod_base = OTHER; note = 2'-O-methyladenosine-3'-phosphate
  modified_base 8: mod_base = OTHER; note = 2'-O-methyladenosine-3'-phosphate
  modified_base 9: mod_base = OTHER; note = 2'-O-methylguanosine-3'-phosphate
  modified_base 10: mod_base = OTHER; note = 2'-O-methylcytidine-3'-phosphate
  modified_base 11: mod_base = OTHER; note = 2'-O-methyladenosine-3'-phosphate
  modified_base 12: mod_base = OTHER; note = 2'-O-methyladenosine-3'-phosphate
  modified_base 13: mod_base = OTHER; note = 2'-O-methyladenosine-3'-phosphate
  modified_base 14: mod_base = OTHER; note = 2'-fluoroadenosine-3'-phosphate
  modified_base 15: mod_base = OTHER; note = 2'-O-methylcytidine-3'-phosphate
  modified_base 16: mod_base = OTHER; note = 2'-fluoroadenosine-3'-phosphate
  modified_base 17: mod_base = OTHER; note = 2'-O-methylguanosine-3'-phosphate
  modified_base 18: mod_base = OTHER; note = 2'-O-methylguanosine-3'-phosphate
  modified_base 19: mod_base = OTHER; note = 2'-O-methyluridine-3'-phosphate
  modified_base 20: mod_base = OTHER; note = 2'-O-methylcytidine-3'-phosphate
  modified_base 21: mod_base = OTHER; note = 2'-O-methyluridine-3'-phosphorothioate
  modified_base 22: mod_base = OTHER; note = 2'-O-methyladenosine-3'-phosphorothioate
  modified_base 23: mod_base = OTHER; note = 2'-O-methylguanosine
ttacaaaagcaaaacaggtctag

SEQ ID NO: 988 - RNA, 23 nt, synthetic construct
  source 1..23: mol_type = other RNA
  modified_base 1: mod_base = OTHER; note 5'-(E)-vinylphosphonate-2'-O-methyladenosine-3'-phosphoroth ioate
  modified_base 2: mod_base = OTHER; note = 2'-fluorouridine-3'-phosphorothioate
  modified_base 3: mod_base = OTHER; note = 2'-O-methyladenosine-3'-phosphate
  modified_base 4: mod_base = OTHER; note = 2'-O-methyladenosine-3'-phosphate
  modified_base 5: mod_base = OTHER; note = 2'-O-methyladenosine-3'-phosphate
  modified_base 6: mod_base = OTHER; note = 2'-fluorouridine-3'-phosphate
  modified_base 7: mod_base = OTHER; note = 2'-O-methyladenosine-3'-phosphate
  modified_base 8: mod_base = OTHER; note = 2'-O-methyluridine-3'-phosphate
  modified_base 9: mod_base = OTHER; note = 2'-O-methylcytidine-3'-phosphate
  modified_base 10: mod_base = OTHER; note = 2'-O-methyluridine-3'-phosphate
  modified_base 11: mod_base = OTHER; note = 2'-O-methyluridine-3'-phosphate
  modified_base 12: mod_base = OTHER; note = 2'-O-methylcytidine-3'-phosphate
  modified_base 13: mod_base = OTHER; note = 2'-O-methyladenosine-3'-phosphate
  modified_base 14: mod_base = OTHER; note = 2'-fluoroadenosine-3'-phosphate
  modified_base 15: mod_base = OTHER; note = 2'-O-methylguanosine-3'-phosphate
  modified_base 16: mod_base = OTHER; note = 2'-fluorouridine-3'-phosphate
  modified_base 17: mod_base = OTHER; note = 2'-O-methyluridine-3'-phosphate
  modified_base 18: mod_base = OTHER; note = 2'-O-methyladenosine-3'-phosphate
  modified_base 19: mod_base = OTHER; note = 2'-O-methylcytidine-3'-phosphorothioate
  modified_base 20: mod_base = OTHER; note = 2'-O-methyladenosine-3'-phosphorothioate
  modified_base 21: mod_base = OTHER; note = 2'-O-methyladenosine-3'-phosphate
  modified_base 22: mod_base = OTHER; note = 2'-O-methyladenosine-3'-phosphate
  modified_base 23: mod_base = OTHER; note = 2'-O-methyladenosine
ataaatatcttcaagttacaaaa

SEQ ID NO: 989 - RNA, 23 nt, synthetic construct
  source 1..23: mol_type = other RNA
  modified_base 1: mod_base = OTHER; note 5'-(E)-vinylphosphonate-2'-O-methyluridine-3'-phosphorothio ate
  modified_base 2: mod_base = OTHER; note = 2'-fluorouridine-3'-phosphorothioate
  modified_base 3: mod_base = OTHER; note = 2'-O-methylcytidine-3'-phosphate
  modified_base 4: mod_base = OTHER; note = 2'-O-methyladenosine-3'-phosphate
  modified_base 5: mod_base = OTHER; note = 2'-O-methyladenosine-3'-phosphate
  modified_base 6: mod_base = OTHER; note = 2'-fluoroguanosine-3'-phosphate
  modified_base 7: mod_base = OTHER; note = 2'-O-methyluridine-3'-phosphate
  modified_base 8: mod_base = OTHER; note = 2'-O-methyluridine-3'-phosphate
  modified_base 9: mod_base = OTHER; note = 2'-O-methyladenosine-3'-phosphate
  modified_base 10: mod_base = OTHER; note = 2'-O-methylcytidine-3'-phosphate
  modified_base 11: mod_base = OTHER; note = 2'-O-methyladenosine-3'-phosphate
  modified_base 12: mod_base = OTHER; note = 2'-O-methyladenosine-3'-phosphate
  modified_base 13: mod_base = OTHER; note = 2'-O-methyladenosine-3'-phosphate
  modified_base 14: mod_base = OTHER; note = 2'-fluoroadenosine-3'-phosphate
  modified_base 15: mod_base = OTHER; note = 2'-O-methylguanosine-3'-phosphate
  modified_base 16: mod_base = OTHER; note = 2'-fluorocytidine-3'-phosphate
  modified_base 17: mod_base = OTHER; note = 2'-O-methyladenosine-3'-phosphate
  modified_base 18: mod_base = OTHER; note = 2'-O-methyladenosine-3'-phosphate
  modified_base 19: mod_base = OTHER; note = 2'-O-methyladenosine-3'-phosphate
  modified_base 20: mod_base = OTHER; note = 2'-O-methyladenosine-3'-phosphate
  modified_base 21: mod_base = OTHER; note = 2'-O-methylcytidine-3'-phosphorothioate
  modified_base 22: mod_base = OTHER; note = 2'-O-methyladenosine-3'-phosphorothioate
  modified_base 23: mod_base = OTHER; note = 2'-O-methylguanosine
ttcaagttacaaaagcaaaacag

SEQ ID NO: 990 - RNA, 23 nt, synthetic construct
  source 1..23: mol_type = other RNA
  modified_base 1: mod_base = OTHER; note 5'-(E)-vinylphosphonate-2'-O-methyladenosine-3'-phosphoroth ioate
  modified_base 2: mod_base = OTHER; note = 2'-fluoroadenosine-3'-phosphorothioate
  modified_base 3: mod_base = OTHER; note = 2'-O-methylguanosine-3'-phosphate
  modified_base 4: mod_base = OTHER; note = 2'-O-methylcytidine-3'-phosphate
  modified_base 5: mod_base = OTHER; note = 2'-O-methyladenosine-3'-phosphate
  modified_base 6: mod_base = OTHER; note = 2'-fluoroadenosine-3'-phosphate
  modified_base 7: mod_base = OTHER; note = 2'-O-methyladenosine-3'-phosphate
  modified_base 8: mod_base = OTHER; note = 2'-O-methyladenosine-3'-phosphate
  modified_base 9: mod_base = OTHER; note = 2'-O-methylcytidine-3'-phosphate
  modified_base 10: mod_base = OTHER; note = 2'-O-methyladenosine-3'-phosphate
  modified_base 11: mod_base = OTHER; note = 2'-O-methylguanosine-3'-phosphate
  modified_base 12: mod_base = OTHER; note = 2'-O-methylguanosine-3'-phosphate
  modified_base 13: mod_base = OTHER; note = 2'-O-methyluridine-3'-phosphate
  modified_base 14: mod_base = OTHER; note = 2'-fluorocytidine-3'-phosphate
  modified_base 15: mod_base = OTHER; note = 2'-O-methyluridine-3'-phosphate
  modified_base 16: mod_base = OTHER; note = 2'-fluoroadenosine-3'-phosphate
  modified_base 17: mod_base = OTHER; note = 2'-O-methylguanosine-3'-phosphate
  modified_base 18: mod_base = OTHER; note = 2'-O-methyladenosine-3'-phosphate
  modified_base 19: mod_base = OTHER; note = 2'-O-methyladenosine-3'-phosphorothioate
  modified_base 20: mod_base = OTHER; note = 2'-O-methyladenosine-3'-phosphorothioate
  modified_base 21: mod_base = OTHER; note = 2'-O-methyladenosine-3'-phosphate
  modified_base 22: mod_base = OTHER; note = 2'-O-methylguanosine-3'-phosphate
  modified_base 23: mod_base = OTHER; note = 2'-O-methyluridine
aagcaaaacaggtctagaaaagt

SEQ ID NO: 991 - RNA, 23 nt, synthetic construct
  source 1..23: mol_type = other RNA
  modified_base 1: mod_base = OTHER; note 5'-(E)-vinylphosphonate-2'-O-methyluridine-3'-phosphorothio ate
  modified_base 2: mod_base = OTHER; note = 2'-fluorouridine-3'-phosphorothioate
  modified_base 3: mod_base = OTHER; note = 2'-O-methyladenosine-3'-phosphate
  modified_base 4: mod_base = OTHER; note = 2'-O-methylcytidine-3'-phosphate
  modified_base 5: mod_base = OTHER; note = 2'-O-methyladenosine-3'-phosphate
  modified_base 6: mod_base = OTHER; note = 2'-fluoroadenosine-3'-phosphate
  modified_base 7: mod_base = OTHER; note = 2'-O-methyladenosine-3'-phosphate
  modified_base 8: mod_base = OTHER; note = 2'-O-methyladenosine-3'-phosphate
  modified_base 9: mod_base = OTHER; note = 2'-O-methylguanosine-3'-phosphate
  modified_base 10: mod_base = OTHER; note = 2'-O-methylcytidine-3'-phosphate
  modified_base 11: mod_base = OTHER; note = 2'-O-methyladenosine-3'-phosphate
  modified_base 12: mod_base = OTHER; note = 2'-O-methyladenosine-3'-phosphate
  modified_base 13: mod_base = OTHER; note = 2'-O-methyladenosine-3'-phosphate
  modified_base 14: mod_base = OTHER; note = 2'-fluoroadenosine-3'-phosphate
  modified_base 15: mod_base = OTHER; note = 2'-O-methylcytidine-3'-phosphate
  modified_base 16: mod_base = OTHER; note = 2'-fluoroadenosine-3'-phosphate
  modified_base 17: mod_base = OTHER; note = 2'-O-methylguanosine-3'-phosphate
  modified_base 18: mod_base = OTHER; note = 2'-O-methylguanosine-3'-phosphate
  modified_base 19: mod_base = OTHER; note = 2'-O-methyluridine-3'-phosphate
  modified_base 20: mod_base = OTHER; note = 2'-O-methylcytidine-3'-phosphate
  modified_base 21: mod_base = OTHER; note = 2'-O-methyluridine-3'-phosphorothioate
  modified_base 22: mod_base = OTHER; note = 2'-O-methyladenosine-3'-phosphorothioate
  modified_base 23: mod_base = OTHER; note = 2'-O-methylguanosine
ttacaaaagcaaaacaggtctag

SEQ ID NO: 992 - RNA, 23 nt, synthetic construct
  source 1..23: mol_type = other RNA
  modified_base 1: mod_base = OTHER; note 5'-(E)-vinylphosphonate-2'-O-methyladenosine-3'-phosphoroth ioate
  modified_base 2: mod_base = OTHER; note = 2'-fluorouridine-3'-phosphorothioate
  modified_base 3: mod_base = OTHER; note = 2'-O-methyladenosine-3'-phosphate
  modified_base 4: mod_base = OTHER; note = 2'-O-methyladenosine-3'-phosphate
  modified_base 5: mod_base = OTHER; note = 2'-O-methyladenosine-3'-phosphate
  modified_base 6: mod_base = OTHER; note = 2'-fluorouridine-3'-phosphate
  modified_base 7: mod_base = OTHER; note = 2'-O-methyladenosine-3'-phosphate
  modified_base 8: mod_base = OTHER; note = 2'-O-methyluridine-3'-phosphate
  modified_base 9: mod_base = OTHER; note = 2'-O-methylcytidine-3'-phosphate
  modified_base 10: mod_base = OTHER; note = 2'-O-methyluridine-3'-phosphate
  modified_base 11: mod_base = OTHER; note = 2'-O-methyluridine-3'-phosphate
  modified_base 12: mod_base = OTHER; note = 2'-O-methylcytidine-3'-phosphate
  modified_base 13: mod_base = OTHER; note = 2'-O-methyladenosine-3'-phosphate
  modified_base 14: mod_base = OTHER; note = 2'-fluoroadenosine-3'-phosphate
  modified_base 15: mod_base = OTHER; note = 2'-O-methylguanosine-3'-phosphate
  modified_base 16: mod_base = OTHER; note = 2'-fluorouridine-3'-phosphate
  modified_base 17: mod_base = OTHER; note = 2'-O-methyluridine-3'-phosphate
  modified_base 18: mod_base = OTHER; note = 2'-O-methyladenosine-3'-phosphate
  modified_base 19: mod_base = OTHER; note = 2'-O-methylcytidine-3'-phosphorothioate
  modified_base 20: mod_base = OTHER; note = 2'-O-methyladenosine-3'-phosphorothioate
  modified_base 21: mod_base = OTHER; note = 2'-O-methyladenosine-3'-phosphate
  modified_base 22: mod_base = OTHER; note = 2'-O-methyladenosine-3'-phosphate
  modified_base 23: mod_base = OTHER; note = 2'-O-methyladenosine
ataaatatcttcaagttacaaaa

SEQ ID NO: 993 - RNA, 23 nt, synthetic construct
  source 1..23: mol_type = other RNA
  modified_base 1: mod_base = OTHER; note 5'-(E)-vinylphosphonate-2'-O-methyluridine-3'-phosphorothio ate
  modified_base 2: mod_base = OTHER; note = 2'-fluorouridine-3'-phosphorothioate
  modified_base 3: mod_base = OTHER; note = 2'-O-methylcytidine-3'-phosphate
  modified_base 4: mod_base = OTHER; note = 2'-O-methyladenosine-3'-phosphate
  modified_base 5: mod_base = OTHER; note = 2'-O-methyladenosine-3'-phosphate
  modified_base 6: mod_base = OTHER; note = 2'-fluoroguanosine-3'-phosphate
  modified_base 7: mod_base = OTHER; note = 2'-O-methyluridine-3'-phosphate
  modified_base 8: mod_base = OTHER; note = 2'-O-methyluridine-3'-phosphate
  modified_base 9: mod_base = OTHER; note = 2'-O-methyladenosine-3'-phosphate
  modified_base 10: mod_base = OTHER; note = 2'-O-methylcytidine-3'-phosphate
  modified_base 11: mod_base = OTHER; note = 2'-O-methyladenosine-3'-phosphate
  modified_base 12: mod_base = OTHER; note = 2'-O-methyladenosine-3'-phosphate
  modified_base 13: mod_base = OTHER; note = 2'-O-methyladenosine-3'-phosphate
  modified_base 14: mod_base = OTHER; note = 2'-fluoroadenosine-3'-phosphate
  modified_base 15: mod_base = OTHER; note = 2'-O-methylguanosine-3'-phosphate
  modified_base 16: mod_base = OTHER; note = 2'-fluorocytidine-3'-phosphate
  modified_base 17: mod_base = OTHER; note = 2'-O-methyladenosine-3'-phosphate
  modified_base 18: mod_base = OTHER; note = 2'-O-methyladenosine-3'-phosphate
  modified_base 19: mod_base = OTHER; note = 2'-O-methyladenosine-3'-phosphate
  modified_base 20: mod_base = OTHER; note = 2'-O-methyladenosine-3'-phosphate
  modified_base 21: mod_base = OTHER; note = 2'-O-methylcytidine-3'-phosphorothioate
  modified_base 22: mod_base = OTHER; note = 2'-O-methyladenosine-3'-phosphorothioate
  modified_base 23: mod_base = OTHER; note = 2'-O-methylguanosine
ttcaagttacaaaagcaaaacag

SEQ ID NO: 994 - RNA, 23 nt, synthetic construct
  source 1..23: mol_type = other RNA
  modified_base 1: mod_base = OTHER; note 5'-(E)-vinylphosphonate-2'-O-methyluridine-3'-phosphorothio ate
  modified_base 2: mod_base = OTHER; note = 2'-fluorouridine-3'-phosphorothioate
  modified_base 3: mod_base = OTHER; note = 2'-O-methylcytidine-3'-phosphate
  modified_base 4: mod_base = OTHER; note = 2'-O-methyladenosine-3'-phosphate
  modified_base 5: mod_base = OTHER; note = Adenine glycol nucleic acid-2'-phosphate
  modified_base 6: mod_base = OTHER; note = 2'-fluoroguanosine-3'-phosphate
  modified_base 7: mod_base = OTHER; note = 2'-O-methyluridine-3'-phosphate
  modified_base 8: mod_base = OTHER; note = 2'-O-methyluridine-3'-phosphate
  modified_base 9: mod_base = OTHER; note = 2'-O-methyladenosine-3'-phosphate
  modified_base 10: mod_base = OTHER; note = 2'-O-methylcytidine-3'-phosphate
  modified_base 11: mod_base = OTHER; note = 2'-O-methyladenosine-3'-phosphate
  modified_base 12: mod_base = OTHER; note = 2'-O-methyladenosine-3'-phosphate
  modified_base 13: mod_base = OTHER; note = 2'-O-methyladenosine-3'-phosphate
  modified_base 14: mod_base = OTHER; note = 2'-fluoroadenosine-3'-phosphate
  modified_base 15: mod_base = OTHER; note = 2'-O-methylguanosine-3'-phosphate
  modified_base 16: mod_base = OTHER; note = 2'-fluorocytidine-3'-phosphate
  modified_base 17: mod_base = OTHER; note = 2'-O-methyladenosine-3'-phosphate
  modified_base 18: mod_base = OTHER; note = 2'-O-methyladenosine-3'-phosphate
  modified_base 19: mod_base = OTHER; note = 2'-O-methyladenosine-3'-phosphate
  modified_base 20: mod_base = OTHER; note = 2'-O-methyladenosine-3'-phosphate
  modified_base 21: mod_base = OTHER; note = 2'-O-methylcytidine-3'-phosphorothioate
  modified_base 22: mod_base = OTHER; note = 2'-O-methyladenosine-3'-phosphorothioate
  modified_base 23: mod_base = OTHER; note = 2'-O-methylguanosine
ttcaagttacaaaagcaaaacag

SEQ ID NO: 995 - RNA, 23 nt, synthetic construct
  source 1..23: mol_type = other RNA
  modified_base 1: mod_base = OTHER; note 5'-(E)-vinylphosphonate-2'-O-methyluridine-3'-phosphorothio ate
  modified_base 2: mod_base = OTHER; note = 2'-fluorouridine-3'-phosphorothioate
  modified_base 3: mod_base = OTHER; note = 2'-O-methylcytidine-3'-phosphate
  modified_base 4: mod_base = OTHER; note = 2'-O-methyladenosine-3'-phosphate
  modified_base 5: mod_base = OTHER; note = 2'-O-methyladenosine-3'-phosphate
  modified_base 6: mod_base = OTHER; note = Guanine glycol nucleic acid-2'-phosphate
  modified_base 7: mod_base = OTHER; note = 2'-O-methyluridine-3'-phosphate
  modified_base 8: mod_base = OTHER; note = 2'-O-methyluridine-3'-phosphate
  modified_base 9: mod_base = OTHER; note = 2'-O-methyladenosine-3'-phosphate
  modified_base 10: mod_base = OTHER; note = 2'-O-methylcytidine-3'-phosphate
  modified_base 11: mod_base = OTHER; note = 2'-O-methyladenosine-3'-phosphate
  modified_base 12: mod_base = OTHER; note = 2'-O-methyladenosine-3'-phosphate
  modified_base 13: mod_base = OTHER; note = 2'-O-methyladenosine-3'-phosphate
  modified_base 14: mod_base = OTHER; note = 2'-fluoroadenosine-3'-phosphate
  modified_base 15: mod_base = OTHER; note = 2'-O-methylguanosine-3'-phosphate
  modified_base 16: mod_base = OTHER; note = 2'-fluorocytidine-3'-phosphate
  modified_base 17: mod_base = OTHER; note = 2'-O-methyladenosine-3'-phosphate
  modified_base 18: mod_base = OTHER; note = 2'-O-methyladenosine-3'-phosphate
  modified_base 19: mod_base = OTHER; note = 2'-O-methyladenosine-3'-phosphate
  modified_base 20: mod_base = OTHER; note = 2'-O-methyladenosine-3'-phosphate
  modified_base 21: mod_base = OTHER; note = 2'-O-methylcytidine-3'-phosphorothioate
  modified_base 22: mod_base = OTHER; note = 2'-O-methyladenosine-3'-phosphorothioate
  modified_base 23: mod_base = OTHER; note = 2'-O-methylguanosine
ttcaagttacaaaagcaaaacag

SEQ ID NO: 996 - RNA, 23 nt, synthetic construct
  source 1..23: mol_type = other RNA
  modified_base 1: mod_base = OTHER; note 5'-(E)-vinylphosphonate-2'-O-methyluridine-3'-phosphorothio ate
  modified_base 2: mod_base = OTHER; note = 2'-fluorouridine-3'-phosphorothioate
  modified_base 3: mod_base = OTHER; note = 2'-O-methylcytidine-3'-phosphate
  modified_base 4: mod_base = OTHER; note = 2'-O-methyladenosine-3'-phosphate
  modified_base 5: mod_base = OTHER; note = 2'-O-methyladenosine-3'-phosphate
  modified_base 6: mod_base = OTHER; note = 2'-fluoroguanosine-3'-phosphate
  modified_base 7: mod_base = OTHER; note = Uracil glycol nucleic acid-2'-phosphate
  modified_base 8: mod_base = OTHER; note = 2'-O-methyluridine-3'-phosphate
  modified_base 9: mod_base = OTHER; note = 2'-O-methyladenosine-3'-phosphate
  modified_base 10: mod_base = OTHER; note = 2'-O-methylcytidine-3'-phosphate
  modified_base 11: mod_base = OTHER; note = 2'-O-methyladenosine-3'-phosphate
  modified_base 12: mod_base = OTHER; note = 2'-O-methyladenosine-3'-phosphate
  modified_base 13: mod_base = OTHER; note = 2'-O-methyladenosine-3'-phosphate
  modified_base 14: mod_base = OTHER; note = 2'-fluoroadenosine-3'-phosphate
  modified_base 15: mod_base = OTHER; note = 2'-O-methylguanosine-3'-phosphate
  modified_base 16: mod_base = OTHER; note = 2'-fluorocytidine-3'-phosphate
  modified_base 17: mod_base = OTHER; note = 2'-O-methyladenosine-3'-phosphate
  modified_base 18: mod_base = OTHER; note = 2'-O-methyladenosine-3'-phosphate
  modified_base 19: mod_base = OTHER; note = 2'-O-methyladenosine-3'-phosphate
  modified_base 20: mod_base = OTHER; note = 2'-O-methyladenosine-3'-phosphate
  modified_base 21: mod_base = OTHER; note = 2'-O-methylcytidine-3'-phosphorothioate
  modified_base 22: mod_base = OTHER; note = 2'-O-methyladenosine-3'-phosphorothioate
  modified_base 23: mod_base = OTHER; note = 2'-O-methylguanosine
ttcaagttacaaaagcaaaacag

SEQ ID NO: 997 - RNA, 23 nt, synthetic construct
  source 1..23: mol_type = other RNA
  modified_base 1: mod_base = OTHER; note 5'-(E)-vinylphosphonate-2'-O-methyluridine-3'-phosphorothio ate
  modified_base 2: mod_base = OTHER; note = 2'-fluorouridine-3'-phosphorothioate
  modified_base 3: mod_base = OTHER; note = 2'-O-methylcytidine-3'-phosphate
  modified_base 4: mod_base = OTHER; note = 2'-O-methyladenosine-3'-phosphate
  modified_base 5: mod_base = OTHER; note = Adenine threose nucleic acid-2'-phosphate
  modified_base 6: mod_base = OTHER; note = 2'-fluoroguanosine-3'-phosphate
  modified_base 7: mod_base = OTHER; note = 2'-O-methyluridine-3'-phosphate
  modified_base 8: mod_base = OTHER; note = 2'-O-methyluridine-3'-phosphate
  modified_base 9: mod_base = OTHER; note = 2'-O-methyladenosine-3'-phosphate
  modified_base 10: mod_base = OTHER; note = 2'-O-methylcytidine-3'-phosphate
  modified_base 11: mod_base = OTHER; note = 2'-O-methyladenosine-3'-phosphate
  modified_base 12: mod_base = OTHER; note = 2'-O-methyladenosine-3'-phosphate
  modified_base 13: mod_base = OTHER; note = 2'-O-methyladenosine-3'-phosphate
  modified_base 14: mod_base = OTHER; note = 2'-fluoroadenosine-3'-phosphate
  modified_base 15: mod_base = OTHER; note = 2'-O-methylguanosine-3'-phosphate
  modified_base 16: mod_base = OTHER; note = 2'-fluorocytidine-3'-phosphate
  modified_base 17: mod_base = OTHER; note = 2'-O-methyladenosine-3'-phosphate
  modified_base 18: mod_base = OTHER; note = 2'-O-methyladenosine-3'-phosphate
  modified_base 19: mod_base = OTHER; note = 2'-O-methyladenosine-3'-phosphate
  modified_base 20: mod_base = OTHER; note = 2'-O-methyladenosine-3'-phosphate
  modified_base 21: mod_base = OTHER; note = 2'-O-methylcytidine-3'-phosphorothioate
  modified_base 22: mod_base = OTHER; note = 2'-O-methyladenosine-3'-phosphorothioate
  modified_base 23: mod_base = OTHER; note = 2'-O-methylguanosine
ttcaagttacaaaagcaaaacag

SEQ ID NO: 998 - RNA, 23 nt, synthetic construct
  source 1..23: mol_type = other RNA
  modified_base 1: mod_base = OTHER; note 5'-(E)-vinylphosphonate-2'-O-methyluridine-3'-phosphorothio ate
  modified_base 2: mod_base = OTHER; note = 2'-fluorouridine-3'-phosphorothioate
  modified_base 3: mod_base = OTHER; note = 2'-O-methylcytidine-3'-phosphate
  modified_base 4: mod_base = OTHER; note = 2'-O-methyladenosine-3'-phosphate
  modified_base 5: mod_base = OTHER; note = 2'-O-methyladenosine-3'-phosphate
  modified_base 6: mod_base = OTHER; note = Guanine threose nucleic acid-2'-phosphate
  modified_base 7: mod_base = OTHER; note = 2'-O-methyluridine-3'-phosphate
  modified_base 8: mod_base = OTHER; note = 2'-O-methyluridine-3'-phosphate
  modified_base 9: mod_base = OTHER; note = 2'-O-methyladenosine-3'-phosphate
  modified_base 10: mod_base = OTHER; note = 2'-O-methylcytidine-3'-phosphate
  modified_base 11: mod_base = OTHER; note = 2'-O-methyladenosine-3'-phosphate
  modified_base 12: mod_base = OTHER; note = 2'-O-methyladenosine-3'-phosphate
  modified_base 13: mod_base = OTHER; note = 2'-O-methyladenosine-3'-phosphate
  modified_base 14: mod_base = OTHER; note = 2'-fluoroadenosine-3'-phosphate
  modified_base 15: mod_base = OTHER; note = 2'-O-methylguanosine-3'-phosphate
  modified_base 16: mod_base = OTHER; note = 2'-fluorocytidine-3'-phosphate
  modified_base 17: mod_base = OTHER; note = 2'-O-methyladenosine-3'-phosphate
  modified_base 18: mod_base = OTHER; note = 2'-O-methyladenosine-3'-phosphate
  modified_base 19: mod_base = OTHER; note = 2'-O-methyladenosine-3'-phosphate
  modified_base 20: mod_base = OTHER; note = 2'-O-methyladenosine-3'-phosphate
  modified_base 21: mod_base = OTHER; note = 2'-O-methylcytidine-3'-phosphorothioate
  modified_base 22: mod_base = OTHER; note = 2'-O-methyladenosine-3'-phosphorothioate
  modified_base 23: mod_base = OTHER; note = 2'-O-methylguanosine
ttcaagttacaaaagcaaaacag

SEQ ID NO: 999 - RNA, 23 nt, synthetic construct
  source 1..23: mol_type = other RNA
  modified_base 1: mod_base = OTHER; note 5'-(E)-vinylphosphonate-2'-O-methyluridine-3'-phosphorothio ate
  modified_base 2: mod_base = OTHER; note = 2'-fluorouridine-3'-phosphorothioate
  modified_base 3: mod_base = OTHER; note = 2'-O-methylcytidine-3'-phosphate
  modified_base 4: mod_base = OTHER; note = 2'-O-methyladenosine-3'-phosphate
  modified_base 5: mod_base = OTHER; note = 2'-O-methyladenosine-3'-phosphate
  modified_base 6: mod_base = OTHER; note = 2'-fluoroguanosine-3'-phosphate
  modified_base 7: mod_base = OTHER; note = Uracil threose nucleic acid-2'-phosphate
  modified_base 8: mod_base = OTHER; note = 2'-O-methyluridine-3'-phosphate
  modified_base 9: mod_base = OTHER; note = 2'-O-methyladenosine-3'-phosphate
  modified_base 10: mod_base = OTHER; note = 2'-O-methylcytidine-3'-phosphate
  modified_base 11: mod_base = OTHER; note = 2'-O-methyladenosine-3'-phosphate
  modified_base 12: mod_base = OTHER; note = 2'-O-methyladenosine-3'-phosphate
  modified_base 13: mod_base = OTHER; note = 2'-O-methyladenosine-3'-phosphate
  modified_base 14: mod_base = OTHER; note = 2'-fluoroadenosine-3'-phosphate
  modified_base 15: mod_base = OTHER; note = 2'-O-methylguanosine-3'-phosphate
  modified_base 16: mod_base = OTHER; note = 2'-fluorocytidine-3'-phosphate
  modified_base 17: mod_base = OTHER; note = 2'-O-methyladenosine-3'-phosphate
  modified_base 18: mod_base = OTHER; note = 2'-O-methyladenosine-3'-phosphate
  modified_base 19: mod_base = OTHER; note = 2'-O-methyladenosine-3'-phosphate
  modified_base 20: mod_base = OTHER; note = 2'-O-methyladenosine-3'-phosphate
  modified_base 21: mod_base = OTHER; note = 2'-O-methylcytidine-3'-phosphorothioate
  modified_base 22: mod_base = OTHER; note = 2'-O-methyladenosine-3'-phosphorothioate
  modified_base 23: mod_base = OTHER; note = 2'-O-methylguanosine
ttcaagttacaaaagcaaaacag

SEQ ID NO: 1000 - DNA, 23 bp, synthetic construct
  source 1..23: mol_type = other DNA
  modified_base 1: mod_base = OTHER; note 5'-(E)-vinylphosphonate-2'-O-methyluridine-3'-phosphorothio ate
  modified_base 2: mod_base = OTHER; note = 2'-fluorouridine-3'-phosphorothioate
  modified_base 3: mod_base = OTHER; note = 2'-O-methylcytidine-3'-phosphate
  modified_base 4: mod_base = OTHER; note = 2'-O-methyladenosine-3'-phosphate
  modified_base 6: mod_base = OTHER; note = 2'-fluoroguanosine-3'-phosphate
  modified_base 7: mod_base = OTHER; note = 2'-O-methyluridine-3'-phosphate
  modified_base 8: mod_base = OTHER; note = 2'-O-methyluridine-3'-phosphate
  modified_base 9: mod_base = OTHER; note = 2'-O-methyladenosine-3'-phosphate
  modified_base 10: mod_base = OTHER; note = 2'-O-methylcytidine-3'-phosphate
  modified_base 11: mod_base = OTHER; note = 2'-O-methyladenosine-3'-phosphate
  modified_base 12: mod_base = OTHER; note = 2'-O-methyladenosine-3'-phosphate
  modified_base 13: mod_base = OTHER; note = 2'-O-methyladenosine-3'-phosphate
  modified_base 14: mod_base = OTHER; note = 2'-fluoroadenosine-3'-phosphate
  modified_base 15: mod_base = OTHER; note = 2'-O-methylguanosine-3'-phosphate
  modified_base 16: mod_base = OTHER; note = 2'-fluorocytidine-3'-phosphate
  modified_base 17: mod_base = OTHER; note = 2'-O-methyladenosine-3'-phosphate
  modified_base 18: mod_base = OTHER; note = 2'-O-methyladenosine-3'-phosphate
  modified_base 19: mod_base = OTHER; note = 2'-O-methyladenosine-3'-phosphate
  modified_base 20: mod_base = OTHER; note = 2'-O-methyladenosine-3'-phosphate
  modified_base 21: mod_base = OTHER; note = 2'-O-methylcytidine-3'-phosphorothioate
  modified_base 22: mod_base = OTHER; note = 2'-O-methyladenosine-3'-phosphorothioate
  modified_base 23: mod_base = OTHER; note = 2'-O-methylguanosine
  misc_feature 1..4: note = RNA
  misc_feature 5: note = DNA
  misc_feature 6..23: note = RNA
ttcaagttacaaaagcaaaacag

SEQ ID NO: 1001 - DNA, 23 bp, synthetic construct
  source 1..23: mol_type = other DNA
  modified_base 1: mod_base = OTHER; note 5'-(E)-vinylphosphonate-2'-O-methyluridine-3'-phosphorothio ate
  modified_base 2: mod_base = OTHER; note = 2'-fluorouridine-3'-phosphorothioate
  modified_base 3: mod_base = OTHER; note = 2'-O-methylcytidine-3'-phosphate
  modified_base 4: mod_base = OTHER; note = 2'-O-methyladenosine-3'-phosphate
  modified_base 5: mod_base = OTHER; note = 2'-O-methyladenosine-3'-phosphate
  modified_base 7: mod_base = OTHER; note = 2'-O-methyluridine-3'-phosphate
  modified_base 8: mod_base = OTHER; note = 2'-O-methyluridine-3'-phosphate
  modified_base 9: mod_base = OTHER; note = 2'-O-methyladenosine-3'-phosphate
  modified_base 10: mod_base = OTHER; note = 2'-O-methylcytidine-3'-phosphate
  modified_base 11: mod_base = OTHER; note = 2'-O-methyladenosine-3'-phosphate
  modified_base 12: mod_base = OTHER; note = 2'-O-methyladenosine-3'-phosphate
  modified_base 13: mod_base = OTHER; note = 2'-O-methyladenosine-3'-phosphate
  modified_base 14: mod_base = OTHER; note = 2'-fluoroadenosine-3'-phosphate
  modified_base 15: mod_base = OTHER; note = 2'-O-methylguanosine-3'-phosphate
  modified_base 16: mod_base = OTHER; note = 2'-fluorocytidine-3'-phosphate
  modified_base 17: mod_base = OTHER; note = 2'-O-methyladenosine-3'-phosphate
  modified_base 18: mod_base = OTHER; note = 2'-O-methyladenosine-3'-phosphate
  modified_base 19: mod_base = OTHER; note = 2'-O-methyladenosine-3'-phosphate
  modified_base 20: mod_base = OTHER; note = 2'-O-methyladenosine-3'-phosphate
  modified_base 21: mod_base = OTHER; note = 2'-O-methylcytidine-3'-phosphorothioate
  modified_base 22: mod_base = OTHER; note = 2'-O-methyladenosine-3'-phosphorothioate
  modified_base 23: mod_base = OTHER; note = 2'-O-methylguanosine
  misc_feature 1..5: note = RNA
  misc_feature 6: note = DNA
  misc_feature 7..23: note = RNA
ttcaagttacaaaagcaaaacag

SEQ ID NO: 1002 - DNA, 23 bp, synthetic construct
  source 1..23: mol_type = other DNA
  modified_base 1: mod_base = OTHER; note 5'-(E)-vinylphosphonate-2'-O-methyluridine-3'-phosphorothio ate
  modified_base 2: mod_base = OTHER; note = 2'-fluorouridine-3'-phosphorothioate
  modified_base 3: mod_base = OTHER; note = 2'-O-methylcytidine-3'-phosphate
  modified_base 4: mod_base = OTHER; note = 2'-O-methyladenosine-3'-phosphate
  modified_base 5: mod_base = OTHER; note = 2'-O-methyladenosine-3'-phosphate
  modified_base 6: mod_base = OTHER; note = 2'-fluoroguanosine-3'-phosphate
  modified_base 8: mod_base = OTHER; note = 2'-O-methyluridine-3'-phosphate
  modified_base 9: mod_base = OTHER; note = 2'-O-methyladenosine-3'-phosphate
  modified_base 10: mod_base = OTHER; note = 2'-O-methylcytidine-3'-phosphate
  modified_base 11: mod_base = OTHER; note = 2'-O-methyladenosine-3'-phosphate
  modified_base 12: mod_base = OTHER; note = 2'-O-methyladenosine-3'-phosphate
  modified_base 13: mod_base = OTHER; note = 2'-O-methyladenosine-3'-phosphate
  modified_base 14: mod_base = OTHER; note = 2'-fluoroadenosine-3'-phosphate
  modified_base 15: mod_base = OTHER; note = 2'-O-methylguanosine-3'-phosphate
  modified_base 16: mod_base = OTHER; note = 2'-fluorocytidine-3'-phosphate
  modified_base 17: mod_base = OTHER; note = 2'-O-methyladenosine-3'-phosphate
  modified_base 18: mod_base = OTHER; note = 2'-O-methyladenosine-3'-phosphate
  modified_base 19: mod_base = OTHER; note = 2'-O-methyladenosine-3'-phosphate
  modified_base 20: mod_base = OTHER; note = 2'-O-methyladenosine-3'-phosphate
  modified_base 21: mod_base = OTHER; note = 2'-O-methylcytidine-3'-phosphorothioate
  modified_base 22: mod_base = OTHER; note = 2'-O-methyladenosine-3'-phosphorothioate
  modified_base 23: mod_base = OTHER; note = 2'-O-methylguanosine
  misc_feature 1..6: note = RNA
  misc_feature 7: note = DNA
  misc_feature 8..23: note = RNA
ttcaagttacaaaagcaaaacag

SEQ ID NO: 1003 - RNA, 23 nt, synthetic construct
  source 1..23: mol_type = other RNA
  modified_base 1: mod_base = OTHER; note 5'-(E)-vinylphosphonate-2'-O-methyluridine-3'-phosphorothio ate
  modified_base 2: mod_base = OTHER; note = 2'-fluorouridine-3'-phosphorothioate
  modified_base 3: mod_base = OTHER; note = 2'-O-methyluridine-3'-phosphate
  modified_base 4: mod_base = OTHER; note = 2'-O-methyladenosine-3'-phosphate
  modified_base 5: mod_base = OTHER; note = 2'-O-methyladenosine-3'-phosphate
  modified_base 6: mod_base = OTHER; note = 2'-fluoroguanosine-3'-phosphate
  modified_base 7: mod_base = OTHER; note = 2'-O-methyluridine-3'-phosphate
  modified_base 8: mod_base = OTHER; note = 2'-O-methyluridine-3'-phosphate
  modified_base 9: mod_base = OTHER; note = 2'-O-methyladenosine-3'-phosphate
  modified_base 10: mod_base = OTHER; note = 2'-O-methylcytidine-3'-phosphate
  modified_base 11: mod_base = OTHER; note = 2'-O-methyladenosine-3'-phosphate
  modified_base 12: mod_base = OTHER; note = 2'-O-methyladenosine-3'-phosphate
  modified_base 13: mod_base = OTHER; note = 2'-O-methyladenosine-3'-phosphate
  modified_base 14: mod_base = OTHER; note = 2'-fluoroadenosine-3'-phosphate
  modified_base 15: mod_base = OTHER; note = 2'-O-methylguanosine-3'-phosphate
  modified_base 16: mod_base = OTHER; note = 2'-fluorocytidine-3'-phosphate
  modified_base 17: mod_base = OTHER; note = 2'-O-methyladenosine-3'-phosphate
  modified_base 18: mod_base = OTHER; note = 2'-O-methyladenosine-3'-phosphate
  modified_base 19: mod_base = OTHER; note = 2'-O-methyladenosine-3'-phosphate
  modified_base 20: mod_base = OTHER; note = 2'-O-methyladenosine-3'-phosphate
  modified_base 21: mod_base = OTHER; note = 2'-O-methylcytidine-3'-phosphorothioate
  modified_base 22: mod_base = OTHER; note = 2'-O-methyladenosine-3'-phosphorothioate
  modified_base 23: mod_base = OTHER; note = 2'-O-methylguanosine
tttaagttacaaaagcaaaacag

SEQ ID NO: 1004 - RNA, 23 nt, synthetic construct
  source 1..23: mol_type = other RNA
  modified_base 1: mod_base = OTHER; note 5'-(E)-vinylphosphonate-2'-O-methyladenosine-3'-phosphoroth ioate
  modified_base 2: mod_base = OTHER; note = 2'-fluorocytidine-3'-phosphorothioate
  modified_base 3: mod_base = OTHER; note = 2'-O-methyladenosine-3'-phosphate
  modified_base 4: mod_base = OTHER; note = 2'-O-methyladenosine-3'-phosphate
  modified_base 5: mod_base = OTHER; note = 2'-O-methyladenosine-3'-phosphate
  modified_base 6: mod_base = OTHER; note = 2'-fluoroadenosine-3'-phosphate
  modified_base 7: mod_base = OTHER; note = 2'-O-methylguanosine-3'-phosphate
  modified_base 8: mod_base = OTHER; note = 2'-O-methylcytidine-3'-phosphate
  modified_base 9: mod_base = OTHER; note = 2'-O-methyladenosine-3'-phosphate
  modified_base 10: mod_base = OTHER; note = 2'-O-methyladenosine-3'-phosphate
  modified_base 11: mod_base = OTHER; note = 2'-O-methyladenosine-3'-phosphate
  modified_base 12: mod_base = OTHER; note = 2'-O-methyladenosine-3'-phosphate
  modified_base 13: mod_base = OTHER; note = 2'-O-methylcytidine-3'-phosphate
  modified_base 14: mod_base = OTHER; note = 2'-fluoroadenosine-3'-phosphate
  modified_base 15: mod_base = OTHER; note = 2'-O-methylguanosine-3'-phosphate
  modified_base 16: mod_base = OTHER; note = 2'-fluoroguanosine-3'-phosphate
  modified_base 17: mod_base = OTHER; note = 2'-O-methyluridine-3'-phosphate
  modified_base 18: mod_base = OTHER; note = 2'-O-methylcytidine-3'-phosphate
  modified_base 19: mod_base = OTHER; note = 2'-O-methyluridine-3'-phosphate
  modified_base 20: mod_base = OTHER; note = 2'-O-methyladenosine-3'-phosphate
  modified_base 21: mod_base = OTHER; note = 2'-O-methylguanosine-3'-phosphorothioate
  modified_base 22: mod_base = OTHER; note = 2'-O-methyladenosine-3'-phosphorothioate
  modified_base 23: mod_base = OTHER; note = 2'-O-methyladenosine
acaaaagcaaaacaggtctagaa

SEQ ID NO: 1005 - RNA, 23 nt, synthetic construct
  source 1..23: mol_type = other RNA
  modified_base 1: mod_base = OTHER; note 5'-(E)-vinylphosphonate-2'-O-methyladenosine-3'-phosphoroth ioate
  modified_base 2: mod_base = OTHER; note = 2'-fluorocytidine-3'-phosphorothioate
  modified_base 3: mod_base = OTHER; note = Adenine threose nucleic acid-2'-phosphate
  modified_base 4: mod_base = OTHER; note = 2'-O-methyladenosine-3'-phosphate
  modified_base 5: mod_base = OTHER; note = 2'-O-methyladenosine-3'-phosphate
  modified_base 6: mod_base = OTHER; note = 2'-fluoroadenosine-3'-phosphate
  modified_base 7: mod_base = OTHER; note = 2'-O-methylguanosine-3'-phosphate
  modified_base 8: mod_base = OTHER; note = 2'-O-methylcytidine-3'-phosphate
  modified_base 9: mod_base = OTHER; note = 2'-O-methyladenosine-3'-phosphate
  modified_base 10: mod_base = OTHER; note = 2'-O-methyladenosine-3'-phosphate
  modified_base 11: mod_base = OTHER; note = 2'-O-methyladenosine-3'-phosphate
  modified_base 12: mod_base = OTHER; note = 2'-O-methyladenosine-3'-phosphate
  modified_base 13: mod_base = OTHER; note = 2'-O-methylcytidine-3'-phosphate
  modified_base 14: mod_base = OTHER; note = 2'-fluoroadenosine-3'-phosphate
  modified_base 15: mod_base = OTHER; note = 2'-O-methylguanosine-3'-phosphate
  modified_base 16: mod_base = OTHER; note = 2'-fluoroguanosine-3'-phosphate
  modified_base 17: mod_base = OTHER; note = 2'-O-methyluridine-3'-phosphate
  modified_base 18: mod_base = OTHER; note = 2'-O-methylcytidine-3'-phosphate
  modified_base 19: mod_base = OTHER; note = 2'-O-methyluridine-3'-phosphate
  modified_base 20: mod_base = OTHER; note = 2'-O-methyladenosine-3'-phosphate
  modified_base 21: mod_base = OTHER; note = 2'-O-methylguanosine-3'-phosphorothioate
  modified_base 22: mod_base = OTHER; note = 2'-O-methyladenosine-3'-phosphorothioate
  modified_base 23: mod_base = OTHER; note = 2'-O-methyladenosine
acaaaagcaaaacaggtctagaa

SEQ ID NO: 1006 - RNA, 23 nt, synthetic construct
  source 1..23: mol_type = other RNA
  modified_base 1: mod_base = OTHER; note 5'-(E)-vinylphosphonate-2'-O-methyladenosine-3'-phosphoroth ioate
  modified_base 2: mod_base = OTHER; note = 2'-fluorocytidine-3'-phosphorothioate
  modified_base 3: mod_base = OTHER; note = 2'-O-methyladenosine-3'-phosphate
  modified_base 4: mod_base = OTHER; note = 2'-O-methyladenosine-3'-phosphate
  modified_base 5: mod_base = OTHER; note = 2'-O-methyladenosine-3'-phosphate
  modified_base 6: mod_base = OTHER; note = 2'-fluoroadenosine-3'-phosphate
  modified_base 7: mod_base = OTHER; note = 2'-O-methylguanosine-3'-phosphate
  modified_base 8: mod_base = OTHER; note = 2'-O-methylcytidine-3'-phosphate
  modified_base 9: mod_base = OTHER; note = 2'-O-methyladenosine-3'-phosphate
  modified_base 10: mod_base = OTHER; note = 2'-O-methyladenosine-3'-phosphate
  modified_base 11: mod_base = OTHER; note = 2'-O-methyladenosine-3'-phosphate
  modified_base 12: mod_base = OTHER; note = 2'-O-methyladenosine-3'-phosphate
  modified_base 13: mod_base = OTHER; note = 2'-O-methylcytidine-3'-phosphate
  modified_base 14: mod_base = OTHER; note = 2'-fluoroadenosine-3'-phosphate
  modified_base 15: mod_base = OTHER; note = 2'-O-methylguanosine-3'-phosphate
  modified_base 16: mod_base = OTHER; note = 2'-fluoroguanosine-3'-phosphate
  modified_base 17: mod_base = OTHER; note = 2'-O-methyluridine-3'-phosphate
  modified_base 18: mod_base = OTHER; note = 2'-O-methylcytidine-3'-phosphate
  modified_base 19: mod_base = OTHER; note = 2'-O-methyluridine-3'-phosphate
  modified_base 20: mod_base = OTHER; note = 2'-O-methyladenosine-3'-phosphate
  modified_base 21: mod_base = OTHER; note = 2'-O-methylguanosine-3'-phosphorothioate
  modified_base 22: mod_base = OTHER; note = 2'-O-methyladenosine-3'-phosphorothioate
  modified_base 23: mod_base = OTHER; note = 2'-O-methyladenosine
acaaaagcaaaacaggtctagaa

SEQ ID NO: 1007 - RNA, 23 nt, synthetic construct
  source 1..23: mol_type = other RNA
  modified_base 1: mod_base = OTHER; note 5'-(E)-vinylphosphonate-2'-O-methyluridine-3'-phosphorothio ate
  modified_base 2: mod_base = OTHER; note = 2'-fluorouridine-3'-phosphorothioate
  modified_base 3: mod_base = OTHER; note = 2'-O-methylcytidine-3'-phosphate
  modified_base 4: mod_base = OTHER; note = 2'-O-methyladenosine-3'-phosphate
  modified_base 5: mod_base = OTHER; note = 2'-O-methyladenosine-3'-phosphate
  modified_base 6: mod_base = OTHER; note = 2'-fluoroguanosine-3'-phosphate
  modified_base 7: mod_base = OTHER; note = 2'-O-methyluridine-3'-phosphate
  modified_base 8: mod_base = OTHER; note = 2'-O-methyluridine-3'-phosphate
  modified_base 9: mod_base = OTHER; note = 2'-O-methyladenosine-3'-phosphate
  modified_base 10: mod_base = OTHER; note = 2'-O-methylcytidine-3'-phosphate
  modified_base 11: mod_base = OTHER; note = 2'-O-methyladenosine-3'-phosphate
  modified_base 12: mod_base = OTHER; note = 2'-O-methyladenosine-3'-phosphate
  modified_base 13: mod_base = OTHER; note = 2'-O-methyladenosine-3'-phosphate
  modified_base 14: mod_base = OTHER; note = 2'-fluoroadenosine-3'-phosphate
  modified_base 15: mod_base = OTHER; note = 2'-O-methylguanosine-3'-phosphate
  modified_base 16: mod_base = OTHER; note = 2'-fluorocytidine-3'-phosphate
  modified_base 17: mod_base = OTHER; note = 2'-O-methyladenosine-3'-phosphate
  modified_base 18: mod_base = OTHER; note = 2'-O-methyladenosine-3'-phosphate
  modified_base 19: mod_base = OTHER; note = 2'-O-methyladenosine-3'-phosphate
  modified_base 20: mod_base = OTHER; note = 2'-O-methyladenosine-3'-phosphate
  modified_base 21: mod_base = OTHER; note = 2'-O-methylcytidine-3'-phosphorothioate
  modified_base 22: mod_base = OTHER; note = 2'-O-methyladenosine-3'-phosphorothioate
  modified_base 23: mod_base = OTHER; note = 2'-O-methylguanosine
ttcaagttacaaaagcaaaacag

SEQ ID NO: 1008 - RNA, 23 nt, synthetic construct
  source 1..23: mol_type = other RNA
  modified_base 1: mod_base = OTHER; note 5'-(E)-vinylphosphonate-2'-O-methyluridine-3'-phosphorothio ate
  modified_base 2: mod_base = OTHER; note = 2'-fluorouridine-3'-phosphorothioate
  modified_base 3: mod_base = OTHER; note = Cytosine threose nucleic acid-2'-phosphate
  modified_base 4: mod_base = OTHER; note = 2'-O-methyladenosine-3'-phosphate
  modified_base 5: mod_base = OTHER; note = 2'-O-methyladenosine-3'-phosphate
  modified_base 6: mod_base = OTHER; note = 2'-fluoroguanosine-3'-phosphate
  modified_base 7: mod_base = OTHER; note = 2'-O-methyluridine-3'-phosphate
  modified_base 8: mod_base = OTHER; note = 2'-O-methyluridine-3'-phosphate
  modified_base 9: mod_base = OTHER; note = 2'-O-methyladenosine-3'-phosphate
  modified_base 10: mod_base = OTHER; note = 2'-O-methylcytidine-3'-phosphate
  modified_base 11: mod_base = OTHER; note = 2'-O-methyladenosine-3'-phosphate
  modified_base 12: mod_base = OTHER; note = 2'-O-methyladenosine-3'-phosphate
  modified_base 13: mod_base = OTHER; note = 2'-O-methyladenosine-3'-phosphate
  modified_base 14: mod_base = OTHER; note = 2'-fluoroadenosine-3'-phosphate
  modified_base 15: mod_base = OTHER; note = 2'-O-methylguanosine-3'-phosphate
  modified_base 16: mod_base = OTHER; note = 2'-fluorocytidine-3'-phosphate
  modified_base 17: mod_base = OTHER; note = 2'-O-methyladenosine-3'-phosphate
  modified_base 18: mod_base = OTHER; note = 2'-O-methyladenosine-3'-phosphate
  modified_base 19: mod_base = OTHER; note = 2'-O-methyladenosine-3'-phosphate
  modified_base 20: mod_base = OTHER; note = 2'-O-methyladenosine-3'-phosphate
  modified_base 21: mod_base = OTHER; note = 2'-O-methylcytidine-3'-phosphorothioate
  modified_base 22: mod_base = OTHER; note = 2'-O-methyladenosine-3'-phosphorothioate
  modified_base 23: mod_base = OTHER; note = 2'-O-methylguanosine
ttcaagttacaaaagcaaaacag

SEQ ID NO: 1009 - RNA, 23 nt, synthetic construct
  source 1..23: mol_type = other RNA
  modified_base 1: mod_base = OTHER; note 5'-(E)-vinylphosphonate-2'-O-methyluridine-3'-phosphorothio ate
  modified_base 2: mod_base = OTHER; note = 2'-fluorouridine-3'-phosphorothioate
  modified_base 3: mod_base = OTHER; note = Cytosine threose nucleic acid-2'-phosphate
  modified_base 4: mod_base = OTHER; note = 2'-O-methyladenosine-3'-phosphate
  modified_base 5: mod_base = OTHER; note = Adenine threose nucleic acid-2'-phosphate
  modified_base 6: mod_base = OTHER; note = 2'-fluoroguanosine-3'-phosphate
  modified_base 7: mod_base = OTHER; note = 2'-O-methyluridine-3'-phosphate
  modified_base 8: mod_base = OTHER; note = 2'-O-methyluridine-3'-phosphate
  modified_base 9: mod_base = OTHER; note = 2'-O-methyladenosine-3'-phosphate
  modified_base 10: mod_base = OTHER; note = 2'-O-methylcytidine-3'-phosphate
  modified_base 11: mod_base = OTHER; note = 2'-O-methyladenosine-3'-phosphate
  modified_base 12: mod_base = OTHER; note = 2'-O-methyladenosine-3'-phosphate
  modified_base 13: mod_base = OTHER; note = 2'-O-methyladenosine-3'-phosphate
  modified_base 14: mod_base = OTHER; note = 2'-fluoroadenosine-3'-phosphate
  modified_base 15: mod_base = OTHER; note = 2'-O-methylguanosine-3'-phosphate
  modified_base 16: mod_base = OTHER; note = 2'-fluorocytidine-3'-phosphate
  modified_base 17: mod_base = OTHER; note = 2'-O-methyladenosine-3'-phosphate
  modified_base 18: mod_base = OTHER; note = 2'-O-methyladenosine-3'-phosphate
  modified_base 19: mod_base = OTHER; note = 2'-O-methyladenosine-3'-phosphate
  modified_base 20: mod_base = OTHER; note = 2'-O-methyladenosine-3'-phosphate
  modified_base 21: mod_base = OTHER; note = 2'-O-methylcytidine-3'-phosphorothioate
  modified_base 22: mod_base = OTHER; note = 2'-O-methyladenosine-3'-phosphorothioate
  modified_base 23: mod_base = OTHER; note = 2'-O-methylguanosine
ttcaagttacaaaagcaaaacag

SEQ ID NO: 1010 - RNA, 23 nt, synthetic construct
  source 1..23: mol_type = other RNA
  modified_base 1: mod_base = OTHER; note 5'-(E)-vinylphosphonate-2'-O-methyluridine-3'-phosphorothio ate
  modified_base 2: mod_base = OTHER; note = 2'-fluorouridine-3'-phosphorothioate
  modified_base 3: mod_base = OTHER; note = Cytosine threose nucleic acid-2'-phosphate
  modified_base 4: mod_base = OTHER; note = 2'-O-methyladenosine-3'-phosphate
  modified_base 5: mod_base = OTHER; note = 2'-O-methyladenosine-3'-phosphate
  modified_base 6: mod_base = OTHER; note = Guanine threose nucleic acid-2'-phosphate
  modified_base 7: mod_base = OTHER; note = 2'-O-methyluridine-3'-phosphate
  modified_base 8: mod_base = OTHER; note = 2'-O-methyluridine-3'-phosphate
  modified_base 9: mod_base = OTHER; note = 2'-O-methyladenosine-3'-phosphate
  modified_base 10: mod_base = OTHER; note = 2'-O-methylcytidine-3'-phosphate
  modified_base 11: mod_base = OTHER; note = 2'-O-methyladenosine-3'-phosphate
  modified_base 12: mod_base = OTHER; note = 2'-O-methyladenosine-3'-phosphate
  modified_base 13: mod_base = OTHER; note = 2'-O-methyladenosine-3'-phosphate
  modified_base 14: mod_base = OTHER; note = 2'-fluoroadenosine-3'-phosphate
  modified_base 15: mod_base = OTHER; note = 2'-O-methylguanosine-3'-phosphate
  modified_base 16: mod_base = OTHER; note = 2'-fluorocytidine-3'-phosphate
  modified_base 17: mod_base = OTHER; note = 2'-O-methyladenosine-3'-phosphate
  modified_base 18: mod_base = OTHER; note = 2'-O-methyladenosine-3'-phosphate
  modified_base 19: mod_base = OTHER; note = 2'-O-methyladenosine-3'-phosphate
  modified_base 20: mod_base = OTHER; note = 2'-O-methyladenosine-3'-phosphate
  modified_base 21: mod_base = OTHER; note = 2'-O-methylcytidine-3'-phosphorothioate
  modified_base 22: mod_base = OTHER; note = 2'-O-methyladenosine-3'-phosphorothioate
  modified_base 23: mod_base = OTHER; note = 2'-O-methylguanosine
ttcaagttacaaaagcaaaacag

SEQ ID NO: 1011 - RNA, 23 nt, synthetic construct
  source 1..23: mol_type = other RNA
  modified_base 1: mod_base = OTHER; note 5'-(E)-vinylphosphonate-2'-O-methyluridine-3'-phosphorothio ate
  modified_base 2: mod_base = OTHER; note = 2'-fluorouridine-3'-phosphorothioate
  modified_base 3: mod_base = OTHER; note = Cytosine threose nucleic acid-2'-phosphate
  modified_base 4: mod_base = OTHER; note = 2'-O-methyladenosine-3'-phosphate
  modified_base 5: mod_base = OTHER; note = 2'-O-methyladenosine-3'-phosphate
  modified_base 6: mod_base = OTHER; note = 2'-fluoroguanosine-3'-phosphate
  modified_base 7: mod_base = OTHER; note = Uracil threose nucleic acid-2'-phosphate
  modified_base 8: mod_base = OTHER; note = 2'-O-methyluridine-3'-phosphate
  modified_base 9: mod_base = OTHER; note = 2'-O-methyladenosine-3'-phosphate
  modified_base 10: mod_base = OTHER; note = 2'-O-methylcytidine-3'-phosphate
  modified_base 11: mod_base = OTHER; note = 2'-O-methyladenosine-3'-phosphate
  modified_base 12: mod_base = OTHER; note = 2'-O-methyladenosine-3'-phosphate
  modified_base 13: mod_base = OTHER; note = 2'-O-methyladenosine-3'-phosphate
  modified_base 14: mod_base = OTHER; note = 2'-fluoroadenosine-3'-phosphate
  modified_base 15: mod_base = OTHER; note = 2'-O-methylguanosine-3'-phosphate
  modified_base 16: mod_base = OTHER; note = 2'-fluorocytidine-3'-phosphate
  modified_base 17: mod_base = OTHER; note = 2'-O-methyladenosine-3'-phosphate
  modified_base 18: mod_base = OTHER; note = 2'-O-methyladenosine-3'-phosphate
  modified_base 19: mod_base = OTHER; note = 2'-O-methyladenosine-3'-phosphate
  modified_base 20: mod_base = OTHER; note = 2'-O-methyladenosine-3'-phosphate
  modified_base 21: mod_base = OTHER; note = 2'-O-methylcytidine-3'-phosphorothioate
  modified_base 22: mod_base = OTHER; note = 2'-O-methyladenosine-3'-phosphorothioate
  modified_base 23: mod_base = OTHER; note = 2'-O-methylguanosine
ttcaagttacaaaagcaaaacag

SEQ ID NO: 1012 - DNA, 23 bp, synthetic construct
  source 1..23: mol_type = other DNA
  modified_base 1: mod_base = OTHER; note 5'-(E)-vinylphosphonate-2'-O-methyluridine-3'-phosphorothio ate
  modified_base 2: mod_base = OTHER; note = 2'-fluorouridine-3'-phosphorothioate
  modified_base 3: mod_base = OTHER; note = 2'-O-methylcytidine-3'-phosphate
  modified_base 4: mod_base = OTHER; note = 2'-O-methyladenosine-3'-phosphate
  modified_base 6: mod_base = OTHER; note = 2'-fluoroguanosine-3'-phosphate
  modified_base 8: mod_base = OTHER; note = 2'-O-methyluridine-3'-phosphate
  modified_base 9: mod_base = OTHER; note = 2'-O-methyladenosine-3'-phosphate
  modified_base 10: mod_base = OTHER; note = 2'-O-methylcytidine-3'-phosphate
  modified_base 11: mod_base = OTHER; note = 2'-O-methyladenosine-3'-phosphate
  modified_base 12: mod_base = OTHER; note = 2'-O-methyladenosine-3'-phosphate
  modified_base 13: mod_base = OTHER; note = 2'-O-methyladenosine-3'-phosphate
  modified_base 14: mod_base = OTHER; note = 2'-fluoroadenosine-3'-phosphate
  modified_base 15: mod_base = OTHER; note = 2'-O-methylguanosine-3'-phosphate
  modified_base 16: mod_base = OTHER; note = 2'-fluorocytidine-3'-phosphate
  modified_base 17: mod_base = OTHER; note = 2'-O-methyladenosine-3'-phosphate
  modified_base 18: mod_base = OTHER; note = 2'-O-methyladenosine-3'-phosphate
  modified_base 19: mod_base = OTHER; note = 2'-O-methyladenosine-3'-phosphate
  modified_base 20: mod_base = OTHER; note = 2'-O-methyladenosine-3'-phosphate
  modified_base 21: mod_base = OTHER; note = 2'-O-methylcytidine-3'-phosphorothioate
  modified_base 22: mod_base = OTHER; note = 2'-O-methyladenosine-3'-phosphorothioate
  modified_base 23: mod_base = OTHER; note = 2'-O-methylguanosine
  misc_feature 1..4: note = RNA
  misc_feature 5: note = DNA
  misc_feature 6: note = RNA
  misc_feature 7: note = DNA
  misc_feature 8..23: note = RNA
ttcaagttacaaaagcaaaacag

SEQ ID NO: 1013 - DNA, 21 bp, synthetic construct
  source 1..21: mol_type = other DNA
  modified_base 1: mod_base = OTHER; note 2'-O-methoxyethyl(MOE)-5-methylcytidine-3'-phosphorothioate
  modified_base 2: mod_base = OTHER; note = 2'-O-methoxyethyl(MOE)-thymidine(or 5-methyluridine)-3'-phosphate
  modified_base 3: mod_base = OTHER; note = 2'-O-methyladenosine-3'-phosphate
  modified_base 4: mod_base = OTHER; note = 2'-O-methylguanosine-3'-phosphate
  modified_base 5: mod_base = OTHER; note = 2'-O-methyladenosine-3'-phosphate
  modified_base 6: mod_base = OTHER; note = 2'-O-methylcytidine-3'-phosphate
  modified_base 7: mod_base = OTHER; note = 2'-fluorocytidine-3'-phosphate
  modified_base 8: mod_base = OTHER; note = 2'-O-methyluridine-3'-phosphate
  modified_base 9: mod_base = OTHER; note = 2'-fluoroguanosine-3'-phosphate
  modified_base 10: mod_base = OTHER; note = 2'-fluorouridine-3'-phosphate
  modified_base 12: mod_base = OTHER; note = 2'-O-methyluridine-3'-phosphate
  modified_base 13: mod_base = OTHER; note = 2'-O-methyluridine-3'-phosphate
  modified_base 14: mod_base = OTHER; note = 2'-O-methylguanosine-3'-phosphate
  modified_base 15: mod_base = OTHER; note = 2'-O-methylcytidine-3'-phosphate
  modified_base 16: mod_base = OTHER; note = 2'-O-methyluridine-3'-phosphate
  modified_base 17: mod_base = OTHER; note = 2'-O-methyluridine-3'-phosphate
  modified_base 18: mod_base = OTHER; note = 2'-O-methyluridine-3'-phosphate
  modified_base 19: mod_base = OTHER; note = 2'-O-methyluridine-3'-phosphorothioate
  modified_base 20: mod_base = OTHER; note = 2'-O-methoxyethyl(MOE) guanosine-3'-phosphorothioate
  modified_base 21: mod_base = OTHER; note = 2'-O-methoxyethyl(MOE)-thymidine(or 5-methyluridine)
  misc_feature 1..10: note = RNA
  misc_feature 11: note = DNA
  misc_feature 12..21: note = RNA
ctagacctgttttgcttttgt

SEQ ID NO: 1014 - DNA, 21 bp, synthetic construct
  source 1..21: mol_type = other DNA
  modified_base 1: mod_base = OTHER; note 2'-O-methoxyethyl(MOE)-5-methylcytidine-3'-phosphorothioate
  modified_base 2: mod_base = OTHER; note = 2'-O-methoxyethyl(MOE)-thymidine(or 5-methyluridine)-3'-phosphate
  modified_base 3: mod_base = OTHER; note = 2'-O-methyladenosine-3'-phosphate
  modified_base 4: mod_base = OTHER; note = 2'-O-methylguanosine-3'-phosphate
  modified_base 5: mod_base = OTHER; note = 2'-O-methyladenosine-3'-phosphate
  modified_base 6: mod_base = OTHER; note = 2'-O-methylcytidine-3'-phosphate
  modified_base 7: mod_base = OTHER; note = 2'-fluorocytidine-3'-phosphate
  modified_base 8: mod_base = OTHER; note = 2'-O-methyluridine-3'-phosphate
  modified_base 9: mod_base = OTHER; note = 2'-fluoroguanosine-3'-phosphate
  modified_base 10: mod_base = OTHER; note = 2'-fluorouridine-3'-phosphate
  modified_base 12: mod_base = OTHER; note = 2'-O-methyluridine-3'-phosphate
  modified_base 13: mod_base = OTHER; note = 2'-O-methyluridine-3'-phosphate
  modified_base 14: mod_base = OTHER; note = 2'-O-methylguanosine-3'-phosphate
  modified_base 15: mod_base = OTHER; note = 2'-O-methylcytidine-3'-phosphate
  modified_base 16: mod_base = OTHER; note = 2'-O-methyluridine-3'-phosphate
  modified_base 17: mod_base = OTHER; note = 2'-O-methyluridine-3'-phosphate
  modified_base 18: mod_base = OTHER; note = 2'-O-methyluridine-3'-phosphate
  modified_base 19: mod_base = OTHER; note = 2'-O-methyluridine-3'-phosphate
  modified_base 20: mod_base = OTHER; note = 2'-O-methoxyethyl(MOE) guanosine-3'-phosphorothioate
  modified_base 21: mod_base = OTHER; note = 2'-O-methoxyethyl(MOE)-thymidine(or 5-methyluridine)-3'- phosphorothioate
  misc_feature 1..10: note = RNA
  misc_feature 11: note = DNA
  misc_feature 12..21: note = RNA
ctagacctgttttgcttttgt

SEQ ID NO: 1015 - DNA, 21 bp, synthetic construct
  source 1..21: mol_type = other DNA
  modified_base 1: mod_base = OTHER; note 2'-O-methoxyethyl(MOE)-5-methylcytidine-3'-phosphorothioate
  modified_base 2: mod_base = OTHER; note = 2'-O-methoxyethyl(MOE)-thymidine(or 5-methyluridine)-3'- phosphorothioate
  modified_base 3: mod_base = OTHER; note = 2'-O-methyladenosine-3'-phosphate
  modified_base 4: mod_base = OTHER; note = 2'-O-methylguanosine-3'-phosphate
  modified_base 5: mod_base = OTHER; note = 2'-O-methyladenosine-3'-phosphate
  modified_base 6: mod_base = OTHER; note = 2'-O-methylcytidine-3'-phosphate
  modified_base 7: mod_base = OTHER; note = 2'-fluorocytidine-3'-phosphate
  modified_base 8: mod_base = OTHER; note = 2'-O-methyluridine-3'-phosphate
  modified_base 9: mod_base = OTHER; note = 2'-fluoroguanosine-3'-phosphate
  modified_base 10: mod_base = OTHER; note = 2'-fluorouridine-3'-phosphate
  modified_base 12: mod_base = OTHER; note = 2'-O-methyluridine-3'-phosphate
  modified_base 13: mod_base = OTHER; note = 2'-O-methyluridine-3'-phosphate
  modified_base 14: mod_base = OTHER; note = 2'-O-methylguanosine-3'-phosphate
  modified_base 15: mod_base = OTHER; note = 2'-O-methylcytidine-3'-phosphate
  modified_base 16: mod_base = OTHER; note = 2'-O-methyluridine-3'-phosphate
  modified_base 17: mod_base = OTHER; note = 2'-O-methyluridine-3'-phosphate
  modified_base 18: mod_base = OTHER; note = 2'-O-methyluridine-3'-phosphate
  modified_base 19: mod_base = OTHER; note = 2'-O-methyluridine-3'-phosphorothioate
  modified_base 20: mod_base = OTHER; note = 2'-O-methoxyethyl(MOE) guanosine-3'-phosphorothioate
  modified_base 21: mod_base = OTHER; note = 2'-O-methoxyethyl(MOE)-thymidine(or 5-methyluridine)
  misc_feature 1..10: note = RNA
  misc_feature 11: note = DNA
  misc_feature 12..21: note = RNA
ctagacctgttttgcttttgt

SEQ ID NO: 1016 - DNA, 21 bp, synthetic construct
  source 1..21: mol_type = other DNA
  modified_base 1: mod_base = OTHER; note 2'-O-methoxyethyl(MOE)-5-methylcytidine-3'-phosphorothioate
  modified_base 2: mod_base = OTHER; note = 2'-O-methoxyethyl(MOE)-thymidine(or 5-methyluridine)-3'- phosphorothioate
  modified_base 3: mod_base = OTHER; note = 2'-O-methyladenosine-3'-phosphate
  modified_base 4: mod_base = OTHER; note = 2'-O-methylguanosine-3'-phosphate
  modified_base 5: mod_base = OTHER; note = 2'-O-methyladenosine-3'-phosphate
  modified_base 6: mod_base = OTHER; note = 2'-O-methylcytidine-3'-phosphate
  modified_base 7: mod_base = OTHER; note = 2'-fluorocytidine-3'-phosphate
  modified_base 8: mod_base = OTHER; note = 2'-O-methyluridine-3'-phosphate
  modified_base 9: mod_base = OTHER; note = 2'-fluoroguanosine-3'-phosphate
  modified_base 10: mod_base = OTHER; note = 2'-fluorouridine-3'-phosphate
  modified_base 12: mod_base = OTHER; note = 2'-O-methyluridine-3'-phosphate
  modified_base 13: mod_base = OTHER; note = 2'-O-methyluridine-3'-phosphate
  modified_base 14: mod_base = OTHER; note = 2'-O-methylguanosine-3'-phosphate
  modified_base 15: mod_base = OTHER; note = 2'-O-methylcytidine-3'-phosphate
  modified_base 16: mod_base = OTHER; note = 2'-O-methyluridine-3'-phosphate
  modified_base 17: mod_base = OTHER; note = 2'-O-methyluridine-3'-phosphate
  modified_base 18: mod_base = OTHER; note = 2'-O-methyluridine-3'-phosphate
  modified_base 19: mod_base = OTHER; note = 2'-O-methyluridine-3'-phosphorothioate
  modified_base 20: mod_base = OTHER; note = 2'-O-methoxyethyl(MOE) guanosine-3'-phosphorothioate
  modified_base 21: mod_base = OTHER; note = 2'-O-methoxyethyl(MOE)-thymidine(or 5-methyluridine)
  misc_feature 1..10: note = RNA
  misc_feature 11: note = DNA
  misc_feature 12..21: note = RNA
ctagacctgttttgcttttgt

SEQ ID NO: 1017 - DNA, 21 bp, synthetic construct
  source 1..21: mol_type = other DNA
  modified_base 1: mod_base = OTHER; note 2'-O-methoxyethyl(MOE)-5-methylcytidine-3'-phosphorothioate
  modified_base 2: mod_base = OTHER; note = 2'-O-methoxyethyl(MOE)-thymidine(or 5-methyluridine)-3'- phosphorothioate
  modified_base 3: mod_base = OTHER; note = 2'-O-methyladenosine-3'-phosphate
  modified_base 4: mod_base = OTHER; note = 2'-O-methylguanosine-3'-phosphate
  modified_base 5: mod_base = OTHER; note = 2'-O-methyladenosine-3'-phosphate
  modified_base 6: mod_base = OTHER; note = 2'-O-methylcytidine-3'-phosphate
  modified_base 7: mod_base = OTHER; note = 2'-fluorocytidine-3'-phosphate
  modified_base 8: mod_base = OTHER; note = 2'-O-methyluridine-3'-phosphate
  modified_base 9: mod_base = OTHER; note = 2'-fluoroguanosine-3'-phosphate
  modified_base 10: mod_base = OTHER; note = 2'-fluorouridine-3'-phosphate
  modified_base 12: mod_base = OTHER; note = 2'-O-methyluridine-3'-phosphate
  modified_base 13: mod_base = OTHER; note = 2'-O-methyluridine-3'-phosphate
  modified_base 14: mod_base = OTHER; note = 2'-O-methylguanosine-3'-phosphate
  modified_base 15: mod_base = OTHER; note = 2'-O-methylcytidine-3'-phosphate
  modified_base 16: mod_base = OTHER; note = 2'-O-methyluridine-3'-phosphate
  modified_base 17: mod_base = OTHER; note = 2'-O-methyluridine-3'-phosphate
  modified_base 18: mod_base = OTHER; note = 2'-O-methyluridine-3'-phosphate
  modified_base 19: mod_base = OTHER; note = 2'-O-methyluridine-3'-phosphorothioate
  modified_base 20: mod_base = OTHER; note = 2'-O-methoxyethyl(MOE) guanosine-3'-phosphorothioate
  modified_base 21: mod_base = OTHER; note = 2'-O-methoxyethyl(MOE)-thymidine(or 5-methyluridine)
  misc_feature 1..10: note = RNA
  misc_feature 11: note = DNA
  misc_feature 12..21: note = RNA
ctagacctgttttgcttttgt

SEQ ID NO: 1018 - DNA, 21 bp, synthetic construct
  source 1..21: mol_type = other DNA
  modified_base 1: mod_base = OTHER; note 2'-O-methoxyethyl(MOE)-5-methylcytidine-3'-phosphorothioate
  modified_base 2: mod_base = OTHER; note = 2'-O-methoxyethyl(MOE)-thymidine(or 5-methyluridine)-3'-phosphate
  modified_base 3: mod_base = OTHER; note = 2'-O-methyladenosine-3'-phosphate
  modified_base 4: mod_base = OTHER; note = 2'-O-methylguanosine-3'-phosphate
  modified_base 5: mod_base = OTHER; note = 2'-O-methyladenosine-3'-phosphate
  modified_base 6: mod_base = OTHER; note = 2'-O-methylcytidine-3'-phosphate
  modified_base 7: mod_base = OTHER; note = 2'-fluorocytidine-3'-phosphate
  modified_base 8: mod_base = OTHER; note = 2'-O-methyluridine-3'-phosphate
  modified_base 9: mod_base = OTHER; note = 2'-fluoroguanosine-3'-phosphate
  modified_base 10: mod_base = OTHER; note = 2'-fluorouridine-3'-phosphate
  modified_base 12: mod_base = OTHER; note = 2'-O-methyluridine-3'-phosphate
  modified_base 13: mod_base = OTHER; note = 2'-O-methyluridine-3'-phosphate
  modified_base 14: mod_base = OTHER; note = 2'-O-methylguanosine-3'-phosphate
  modified_base 15: mod_base = OTHER; note = 2'-O-methylcytidine-3'-phosphate
  modified_base 16: mod_base = OTHER; note = 2'-O-methyluridine-3'-phosphate
  modified_base 17: mod_base = OTHER; note = 2'-O-methyluridine-3'-phosphate
  modified_base 18: mod_base = OTHER; note = 2'-O-methyluridine-3'-phosphate
  modified_base 19: mod_base = OTHER; note = 2'-O-methyluridine-3'-phosphorothioate
  modified_base 20: mod_base = OTHER; note = 2'-O-methoxyethyl(MOE) guanosine-3'-phosphorothioate
  modified_base 21: mod_base = OTHER; note = 2'-O-methoxyethyl(MOE)-thymidine(or 5-methyluridine)
  misc_feature 1..10: note = RNA
  misc_feature 11: note = DNA
  misc_feature 12..21: note = RNA
ctagacctgttttgcttttgt

SEQ ID NO: 1019 - RNA, 23 nt, synthetic construct
  source 1..23: mol_type = other RNA
  modified_base 1: mod_base = OTHER; note = 5'-(E)-vinylphosphonate-2'-O-methoxyethyl(MOE) adenosine-3'-phosphorothioate
  modified_base 2: mod_base = OTHER; note = 2'-fluorocytidine-3'-phosphorothioate
  modified_base 3: mod_base = OTHER; note = 2'-O-methyladenosine-3'-phosphate
  modified_base 4: mod_base = OTHER; note = 2'-O-methyladenosine-3'-phosphate
  modified_base 5: mod_base = OTHER; note = 2'-O-methyladenosine-3'-phosphate
  modified_base 6: mod_base = OTHER; note = 2'-fluoroadenosine-3'-phosphate
  modified_base 7: mod_base = OTHER; note = 2'-O-methylguanosine-3'-phosphate
  modified_base 8: mod_base = OTHER; note = 2'-O-methylcytidine-3'-phosphate
  modified_base 9: mod_base = OTHER; note = 2'-O-methyladenosine-3'-phosphate
  modified_base 10: mod_base = OTHER; note = 2'-O-methyladenosine-3'-phosphate
  modified_base 11: mod_base = OTHER; note = 2'-O-methyladenosine-3'-phosphate
  modified_base 12: mod_base = OTHER; note = 2'-O-methyladenosine-3'-phosphate
  modified_base 13: mod_base = OTHER; note = 2'-O-methylcytidine-3'-phosphate
  modified_base 14: mod_base = OTHER; note = 2'-fluoroadenosine-3'-phosphate
  modified_base 15: mod_base = OTHER; note = 2'-O-methylguanosine-3'-phosphate
  modified_base 16: mod_base = OTHER; note = 2'-fluoroguanosine-3'-phosphate
  modified_base 17: mod_base = OTHER; note = 2'-O-methyluridine-3'-phosphate
  modified_base 18: mod_base = OTHER; note = 2'-O-methylcytidine-3'-phosphate
  modified_base 19: mod_base = OTHER; note = 2'-O-methyluridine-3'-phosphate
  modified_base 20: mod_base = OTHER; note = 2'-O-methyladenosine-3'-phosphate
  modified_base 21: mod_base = OTHER; note = 2'-O-methylguanosine-3'-phosphorothioate
  modified_base 22: mod_base = OTHER; note = 2'-O-methyladenosine-3'-phosphorothioate
  modified_base 23: mod_base = OTHER; note = 2'-O-methyladenosine
acaaaagcaaaacaggtctagaa

SEQ ID NO: 1020 - RNA, 23 nt, synthetic construct
  source 1..23: mol_type = other RNA
  modified_base 1: mod_base = OTHER; note 5'-(E)-vinylphosphonate-2'-O-methyladenosine-3'-phosphoroth ioate
  modified_base 2: mod_base = OTHER; note = 2'-fluorocytidine-3'-phosphorothioate
  modified_base 3: mod_base = OTHER; note = 2'-O-methyladenosine-3'-phosphate
  modified_base 4: mod_base = OTHER; note = 2'-O-methyladenosine-3'-phosphate
  modified_base 5: mod_base = OTHER; note = 2'-O-methyladenosine-3'-phosphate
  modified_base 6: mod_base = OTHER; note = 2'-fluoroadenosine-3'-phosphate
  modified_base 7: mod_base = OTHER; note = 2'-O-methylguanosine-3'-phosphate
  modified_base 8: mod_base = OTHER; note = 2'-O-methylcytidine-3'-phosphate
  modified_base 9: mod_base = OTHER; note = 2'-O-methyladenosine-3'-phosphate
  modified_base 10: mod_base = OTHER; note = 2'-O-methyladenosine-3'-phosphate
  modified_base 11: mod_base = OTHER; note = 2'-O-methyladenosine-3'-phosphate
  modified_base 12: mod_base = OTHER; note = 2'-O-methyladenosine-3'-phosphate
  modified_base 13: mod_base = OTHER; note = 2'-O-methylcytidine-3'-phosphate
  modified_base 14: mod_base = OTHER; note = 2'-fluoroadenosine-3'-phosphate
  modified_base 15: mod_base = OTHER; note = 2'-O-methylguanosine-3'-phosphate
  modified_base 16: mod_base = OTHER; note = 2'-fluoroguanosine-3'-phosphate
  modified_base 17: mod_base = OTHER; note = 2'-O-methyluridine-3'-phosphate
  modified_base 18: mod_base = OTHER; note = 2'-O-methylcytidine-3'-phosphate
  modified_base 19: mod_base = OTHER; note = 2'-O-methyluridine-3'-phosphate
  modified_base 20: mod_base = OTHER; note = 2'-O-methyladenosine-3'-phosphate
  modified_base 21: mod_base = OTHER; note = 2'-O-methylguanosine-3'-phosphorothioate
  modified_base 22: mod_base = OTHER; note = 2'-O-methyladenosine-3'-phosphorothioate
  modified_base 23: mod_base = OTHER; note = 2'-O-methyladenosine
acaaaagcaaaacaggtctagaa

SEQ ID NO: 1021 - RNA, 23 nt, synthetic construct
  source 1..23: mol_type = other RNA
  modified_base 1: mod_base = OTHER; note 5'-(E)-vinylphosphonate-2'-O-methyladenosine-3'-phosphoroth ioate
  modified_base 2: mod_base = OTHER; note = 2'-fluorocytidine-3'-phosphorothioate
  modified_base 3: mod_base = OTHER; note = Adenine threose nucleic acid-2'-phosphate
  modified_base 4: mod_base = OTHER; note = 2'-O-methyladenosine-3'-phosphate
  modified_base 5: mod_base = OTHER; note = Adenine threose nucleic acid-2'-phosphate
  modified_base 6: mod_base = OTHER; note = 2'-fluoroadenosine-3'-phosphate
  modified_base 7: mod_base = OTHER; note = 2'-O-methylguanosine-3'-phosphate
  modified_base 8: mod_base = OTHER; note = 2'-O-methylcytidine-3'-phosphate
  modified_base 9: mod_base = OTHER; note = 2'-O-methyladenosine-3'-phosphate
  modified_base 10: mod_base = OTHER; note = 2'-O-methyladenosine-3'-phosphate
  modified_base 11: mod_base = OTHER; note = 2'-O-methyladenosine-3'-phosphate
  modified_base 12: mod_base = OTHER; note = 2'-O-methyladenosine-3'-phosphate
  modified_base 13: mod_base = OTHER; note = 2'-O-methylcytidine-3'-phosphate
  modified_base 14: mod_base = OTHER; note = 2'-fluoroadenosine-3'-phosphate
  modified_base 15: mod_base = OTHER; note = 2'-O-methylguanosine-3'-phosphate
  modified_base 16: mod_base = OTHER; note = 2'-fluoroguanosine-3'-phosphate
  modified_base 17: mod_base = OTHER; note = 2'-O-methyluridine-3'-phosphate
  modified_base 18: mod_base = OTHER; note = 2'-O-methylcytidine-3'-phosphate
  modified_base 19: mod_base = OTHER; note = 2'-O-methyluridine-3'-phosphate
  modified_base 20: mod_base = OTHER; note = 2'-O-methyladenosine-3'-phosphate
  modified_base 21: mod_base = OTHER; note = 2'-O-methylguanosine-3'-phosphorothioate
  modified_base 22: mod_base = OTHER; note = 2'-O-methyladenosine-3'-phosphorothioate
  modified_base 23: mod_base = OTHER; note = 2'-O-methyladenosine
acaaaagcaaaacaggtctagaa

SEQ ID NO: 1022 - RNA, 23 nt, synthetic construct
  source 1..23: mol_type = other RNA
  modified_base 1: mod_base = OTHER; note 5'-(E)-vinylphosphonate-2'-O-methyladenosine-3'-phosphoroth ioate
  modified_base 2: mod_base = OTHER; note = 2'-fluorocytidine-3'-phosphorothioate
  modified_base 3: mod_base = OTHER; note = Adenine threose nucleic acid-2'-phosphate
  modified_base 4: mod_base = OTHER; note = 2'-O-methyladenosine-3'-phosphate
  modified_base 5: mod_base = OTHER; note = 2'-O-methyladenosine-3'-phosphate
  modified_base 6: mod_base = OTHER; note = Adenine threose nucleic acid-2'-phosphate
  modified_base 7: mod_base = OTHER; note = 2'-O-methylguanosine-3'-phosphate
  modified_base 8: mod_base = OTHER; note = 2'-O-methylcytidine-3'-phosphate
  modified_base 9: mod_base = OTHER; note = 2'-O-methyladenosine-3'-phosphate
  modified_base 10: mod_base = OTHER; note = 2'-O-methyladenosine-3'-phosphate
  modified_base 11: mod_base = OTHER; note = 2'-O-methyladenosine-3'-phosphate
  modified_base 12: mod_base = OTHER; note = 2'-O-methyladenosine-3'-phosphate
  modified_base 13: mod_base = OTHER; note = 2'-O-methylcytidine-3'-phosphate
  modified_base 14: mod_base = OTHER; note = 2'-fluoroadenosine-3'-phosphate
  modified_base 15: mod_base = OTHER; note = 2'-O-methylguanosine-3'-phosphate
  modified_base 16: mod_base = OTHER; note = 2'-fluoroguanosine-3'-phosphate
  modified_base 17: mod_base = OTHER; note = 2'-O-methyluridine-3'-phosphate
  modified_base 18: mod_base = OTHER; note = 2'-O-methylcytidine-3'-phosphate
  modified_base 19: mod_base = OTHER; note = 2'-O-methyluridine-3'-phosphate
  modified_base 20: mod_base = OTHER; note = 2'-O-methyladenosine-3'-phosphate
  modified_base 21: mod_base = OTHER; note = 2'-O-methylguanosine-3'-phosphorothioate
  modified_base 22: mod_base = OTHER; note = 2'-O-methyladenosine-3'-phosphorothioate
  modified_base 23: mod_base = OTHER; note = 2'-O-methyladenosine
acaaaagcaaaacaggtctagaa

SEQ ID NO: 1023 - RNA, 23 nt, synthetic construct
  source 1..23: mol_type = other RNA
  modified_base 1: mod_base = OTHER; note 5'-(E)-vinylphosphonate-2'-O-methyladenosine-3'-phosphoroth ioate
  modified_base 2: mod_base = OTHER; note = 2'-fluorocytidine-3'-phosphorothioate
  modified_base 3: mod_base = OTHER; note = Adenine threose nucleic acid-2'-phosphate
  modified_base 4: mod_base = OTHER; note = 2'-O-methyladenosine-3'-phosphate
  modified_base 5: mod_base = OTHER; note = 2'-O-methyladenosine-3'-phosphate
  modified_base 6: mod_base = OTHER; note = 2'-fluoroadenosine-3'-phosphate
  modified_base 7: mod_base = OTHER; note = Guanine threose nucleic acid-2'-phosphate
  modified_base 8: mod_base = OTHER; note = 2'-O-methylcytidine-3'-phosphate
  modified_base 9: mod_base = OTHER; note = 2'-O-methyladenosine-3'-phosphate
  modified_base 10: mod_base = OTHER; note = 2'-O-methyladenosine-3'-phosphate
  modified_base 11: mod_base = OTHER; note = 2'-O-methyladenosine-3'-phosphate
  modified_base 12: mod_base = OTHER; note = 2'-O-methyladenosine-3'-phosphate
  modified_base 13: mod_base = OTHER; note = 2'-O-methylcytidine-3'-phosphate
  modified_base 14: mod_base = OTHER; note = 2'-fluoroadenosine-3'-phosphate
  modified_base 15: mod_base = OTHER; note = 2'-O-methylguanosine-3'-phosphate
  modified_base 16: mod_base = OTHER; note = 2'-fluoroguanosine-3'-phosphate
  modified_base 17: mod_base = OTHER; note = 2'-O-methyluridine-3'-phosphate
  modified_base 18: mod_base = OTHER; note = 2'-O-methylcytidine-3'-phosphate
  modified_base 19: mod_base = OTHER; note = 2'-O-methyluridine-3'-phosphate
  modified_base 20: mod_base = OTHER; note = 2'-O-methyladenosine-3'-phosphate
  modified_base 21: mod_base = OTHER; note = 2'-O-methylguanosine-3'-phosphorothioate
  modified_base 22: mod_base = OTHER; note = 2'-O-methyladenosine-3'-phosphorothioate
  modified_base 23: mod_base = OTHER; note = 2'-O-methyladenosine
acaaaagcaaaacaggtctagaa

SEQ ID NO: 1024 - RNA, 23 nt, synthetic construct
  source 1..23: mol_type = other RNA
  modified_base 1: mod_base = OTHER; note = 5'-(E)-vinylphosphonate-2'-O-methoxyethyl(MOE) adenosine-3'-phosphorothioate
  modified_base 2: mod_base = OTHER; note = 2'-fluorocytidine-3'-phosphorothioate
  modified_base 3: mod_base = OTHER; note = 2'-O-methyladenosine-3'-phosphate
  modified_base 4: mod_base = OTHER; note = 2'-O-methyladenosine-3'-phosphate
  modified_base 5: mod_base = OTHER; note = 2'-O-methyladenosine-3'-phosphate
  modified_base 6: mod_base = OTHER; note = 2'-fluoroadenosine-3'-phosphate
  modified_base 7: mod_base = OTHER; note = 2'-O-methylguanosine-3'-phosphate
  modified_base 8: mod_base = OTHER; note = 2'-O-methylcytidine-3'-phosphate
  modified_base 9: mod_base = OTHER; note = 2'-O-methyladenosine-3'-phosphate
  modified_base 10: mod_base = OTHER; note = 2'-O-methyladenosine-3'-phosphate
  modified_base 11: mod_base = OTHER; note = 2'-O-methyladenosine-3'-phosphate
  modified_base 12: mod_base = OTHER; note = 2'-O-methyladenosine-3'-phosphate
  modified_base 13: mod_base = OTHER; note = 2'-O-methylcytidine-3'-phosphate
  modified_base 14: mod_base = OTHER; note = 2'-fluoroadenosine-3'-phosphate
  modified_base 15: mod_base = OTHER; note = 2'-O-methylguanosine-3'-phosphate
  modified_base 16: mod_base = OTHER; note = 2'-fluoroguanosine-3'-phosphate
  modified_base 17: mod_base = OTHER; note = 2'-O-methyluridine-3'-phosphate
  modified_base 18: mod_base = OTHER; note = 2'-O-methylcytidine-3'-phosphate
  modified_base 19: mod_base = OTHER; note = 2'-O-methyluridine-3'-phosphate
  modified_base 20: mod_base = OTHER; note = 2'-O-methyladenosine-3'-phosphate
  modified_base 21: mod_base = OTHER; note = 2'-O-methylguanosine-3'-phosphorothioate
  modified_base 22: mod_base = OTHER; note = 2'-O-methyladenosine-3'-phosphorothioate
  modified_base 23: mod_base = OTHER; note = 2'-O-methyladenosine
acaaaagcaaaacaggtctagaa

SEQ ID NO: 1025 - DNA, 21 bp, synthetic construct
  source 1..21: mol_type = other DNA
  modified_base 1: mod_base = OTHER; note 2'-O-methoxyethyl(MOE)-5-methylcytidine-3'-phosphorothioate
  modified_base 2: mod_base = OTHER; note = 2'-O-methoxyethyl(MOE)-thymidine(or 5-methyluridine)-3'-phosphate
  modified_base 3: mod_base = OTHER; note = 2'-O-methyladenosine-3'-phosphate
  modified_base 4: mod_base = OTHER; note = 2'-O-methylguanosine-3'-phosphate
  modified_base 5: mod_base = OTHER; note = 2'-O-methyladenosine-3'-phosphate
  modified_base 6: mod_base = OTHER; note = 2'-O-methylcytidine-3'-phosphate
  modified_base 7: mod_base = OTHER; note = 2'-fluorocytidine-3'-phosphate
  modified_base 8: mod_base = OTHER; note = 2'-O-methyluridine-3'-phosphate
  modified_base 9: mod_base = OTHER; note = 2'-fluoroguanosine-3'-phosphate
  modified_base 10: mod_base = OTHER; note = 2'-fluorouridine-3'-phosphate
  modified_base 12: mod_base = OTHER; note = 2'-O-methyluridine-3'-phosphate
  modified_base 13: mod_base = OTHER; note = 2'-O-methyluridine-3'-phosphate
  modified_base 14: mod_base = OTHER; note = 2'-O-methylguanosine-3'-phosphate
  modified_base 15: mod_base = OTHER; note = 2'-O-methylcytidine-3'-phosphate
  modified_base 16: mod_base = OTHER; note = 2'-O-methyluridine-3'-phosphate
  modified_base 17: mod_base = OTHER; note = 2'-O-methyluridine-3'-phosphate
  modified_base 18: mod_base = OTHER; note = 2'-O-methyluridine-3'-phosphate
  modified_base 19: mod_base = OTHER; note = 2'-O-methyluridine-3'-phosphorothioate
  modified_base 20: mod_base = OTHER; note = 2'-O-methoxyethyl(MOE) guanosine-3'-phosphorothioate
  modified_base 21: mod_base = OTHER; note = 2'-O-methoxyethyl(MOE)-thymidine(or 5-methyluridine)-3'-phosphate-(N1-hydroxyethanol-N12[tris(N -acetylgalactosamine-triethyleneglycol)]-diamidodecane]
  misc_feature 1..10: note = RNA
  misc_feature 11: note = DNA
  misc_feature 12..21: note = RNA
ctagacctgttttgcttttgt

SEQ ID NO: 1026 - DNA, 21 bp, synthetic construct
  source 1..21: mol_type = other DNA
  modified_base 1: mod_base = OTHER; note 2'-O-methoxyethyl(MOE)-5-methylcytidine-3'-phosphorothioate
  modified_base 2: mod_base = OTHER; note = 2'-O-methoxyethyl(MOE)-thymidine(or 5-methyluridine)-3'-phosphate
  modified_base 3: mod_base = OTHER; note = 2'-O-methyladenosine-3'-phosphate
  modified_base 4: mod_base = OTHER; note = 2'-O-methylguanosine-3'-phosphate
  modified_base 5: mod_base = OTHER; note = 2'-O-methyladenosine-3'-phosphate
  modified_base 6: mod_base = OTHER; note = 2'-O-methylcytidine-3'-phosphate
  modified_base 7: mod_base = OTHER; note = 2'-fluorocytidine-3'-phosphate
  modified_base 8: mod_base = OTHER; note = 2'-O-methyluridine-3'-phosphate
  modified_base 9: mod_base = OTHER; note = 2'-fluoroguanosine-3'-phosphate
  modified_base 10: mod_base = OTHER; note = 2'-fluorouridine-3'-phosphate
  modified_base 12: mod_base = OTHER; note = 2'-O-methyluridine-3'-phosphate
  modified_base 13: mod_base = OTHER; note = 2'-O-methyluridine-3'-phosphate
  modified_base 14: mod_base = OTHER; note = 2'-O-methylguanosine-3'-phosphate
  modified_base 15: mod_base = OTHER; note = 2'-O-methylcytidine-3'-phosphate
  modified_base 16: mod_base = OTHER; note = 2'-O-methyluridine-3'-phosphate
  modified_base 17: mod_base = OTHER; note = 2'-O-methyluridine-3'-phosphate
  modified_base 18: mod_base = OTHER; note = 2'-O-methyluridine-3'-phosphate
  modified_base 19: mod_base = OTHER; note = 2'-O-methyluridine-3'-phosphate
  modified_base 20: mod_base = OTHER; note = 2'-O-methoxyethyl(MOE) guanosine-3'-phosphorothioate
  modified_base 21: mod_base = OTHER; note = 2'-O-methoxyethyl(MOE)-thymidine(or 5-methyluridine)-3'- phosphorothioate
  misc_feature 1..10: note = RNA
  misc_feature 11: note = DNA
  misc_feature 12..21: note = RNA
ctagacctgttttgcttttgt

SEQ ID NO: 1027 - DNA, 21 bp, synthetic construct
  source 1..21: mol_type = other DNA
  modified_base 1: mod_base = OTHER; note 2'-O-methoxyethyl(MOE)-5-methylcytidine-3'-phosphorothioate
  modified_base 2: mod_base = OTHER; note = 2'-O-methoxyethyl(MOE)-thymidine(or 5-methyluridine)-3'- phosphorothioate
  modified_base 3: mod_base = OTHER; note = 2'-O-methyladenosine-3'-phosphate
  modified_base 4: mod_base = OTHER; note = 2'-O-methylguanosine-3'-phosphate
  modified_base 5: mod_base = OTHER; note = 2'-O-methyladenosine-3'-phosphate
  modified_base 6: mod_base = OTHER; note = 2'-O-methylcytidine-3'-phosphate
  modified_base 7: mod_base = OTHER; note = 2'-fluorocytidine-3'-phosphate
  modified_base 8: mod_base = OTHER; note = 2'-O-methyluridine-3'-phosphate
  modified_base 9: mod_base = OTHER; note = 2'-fluoroguanosine-3'-phosphate
  modified_base 10: mod_base = OTHER; note = 2'-fluorouridine-3'-phosphate
  modified_base 12: mod_base = OTHER; note = 2'-O-methyluridine-3'-phosphate
  modified_base 13: mod_base = OTHER; note = 2'-O-methyluridine-3'-phosphate
  modified_base 14: mod_base = OTHER; note = 2'-O-methylguanosine-3'-phosphate
  modified_base 15: mod_base = OTHER; note = 2'-O-methylcytidine-3'-phosphate
  modified_base 16: mod_base = OTHER; note = 2'-O-methyluridine-3'-phosphate
  modified_base 17: mod_base = OTHER; note = 2'-O-methyluridine-3'-phosphate
  modified_base 18: mod_base = OTHER; note = 2'-O-methyluridine-3'-phosphate
  modified_base 19: mod_base = OTHER; note = 2'-O-methyluridine-3'-phosphorothioate
  modified_base 20: mod_base = OTHER; note = 2'-O-methoxyethyl(MOE) guanosine-3'-phosphorothioate
  modified_base 21: mod_base = OTHER; note = 2'-O-methoxyethyl(MOE)-thymidine(or 5-methyluridine)-3'-phosphate-N-[tris(N-acetylgalactosamine -alkyl)-amidodecanoyl)]-4-hydroxyprolinol (Hyp-(N-acetylgalactosamine-alkyl)3)
  misc_feature 1..10: note = RNA
  misc_feature 11: note = DNA
  misc_feature 12..21: note = RNA
ctagacctgttttgcttttgt

SEQ ID NO: 1028 - DNA, 21 bp, synthetic construct
  source 1..21: mol_type = other DNA
  modified_base 1: mod_base = OTHER; note 2'-O-methoxyethyl(MOE)-5-methylcytidine-3'-phosphorothioate
  modified_base 2: mod_base = OTHER; note = 2'-O-methoxyethyl(MOE)-thymidine(or 5-methyluridine)-3'- phosphorothioate
  modified_base 3: mod_base = OTHER; note = 2'-O-methyladenosine-3'-phosphate
  modified_base 4: mod_base = OTHER; note = 2'-O-methylguanosine-3'-phosphate
  modified_base 5: mod_base = OTHER; note = 2'-O-methyladenosine-3'-phosphate
  modified_base 6: mod_base = OTHER; note = 2'-O-methylcytidine-3'-phosphate
  modified_base 7: mod_base = OTHER; note = 2'-fluorocytidine-3'-phosphate
  modified_base 8: mod_base = OTHER; note = 2'-O-methyluridine-3'-phosphate
  modified_base 9: mod_base = OTHER; note = 2'-fluoroguanosine-3'-phosphate
  modified_base 10: mod_base = OTHER; note = 2'-fluorouridine-3'-phosphate
  modified_base 12: mod_base = OTHER; note = 2'-O-methyluridine-3'-phosphate
  modified_base 13: mod_base = OTHER; note = 2'-O-methyluridine-3'-phosphate
  modified_base 14: mod_base = OTHER; note = 2'-O-methylguanosine-3'-phosphate
  modified_base 15: mod_base = OTHER; note = 2'-O-methylcytidine-3'-phosphate
  modified_base 16: mod_base = OTHER; note = 2'-O-methyluridine-3'-phosphate
  modified_base 17: mod_base = OTHER; note = 2'-O-methyluridine-3'-phosphate
  modified_base 18: mod_base = OTHER; note = 2'-O-methyluridine-3'-phosphate
  modified_base 19: mod_base = OTHER; note = 2'-O-methyluridine-3'-phosphorothioate
  modified_base 20: mod_base = OTHER; note = 2'-O-methoxyethyl(MOE) guanosine-3'-phosphorothioate
  modified_base 21: mod_base = OTHER; note = 2'-O-methoxyethyl(MOE)-thymidine(or 5-methyluridine)-3'-phosphate-N-[tris(N-acetylgalactosamine -alkyl)-amidodecanoyl)]-4-hydroxyprolinol (Hyp-(N-acetylgalactosamine-alkyl)3)
  misc_feature 1..10: note = RNA
  misc_feature 11: note = DNA
  misc_feature 12..21: note = RNA
ctagacctgttttgcttttgt

SEQ ID NO: 1029 - DNA, 21 bp, synthetic construct
  source 1..21: mol_type = other DNA
  modified_base 1: mod_base = OTHER; note 2'-O-methoxyethyl(MOE)-5-methylcytidine-3'-phosphorothioate
  modified_base 2: mod_base = OTHER; note = 2'-O-methoxyethyl(MOE)-thymidine(or 5-methyluridine)-3'- phosphorothioate
  modified_base 3: mod_base = OTHER; note = 2'-O-methyladenosine-3'-phosphate
  modified_base 4: mod_base = OTHER; note = 2'-O-methylguanosine-3'-phosphate
  modified_base 5: mod_base = OTHER; note = 2'-O-methyladenosine-3'-phosphate
  modified_base 6: mod_base = OTHER; note = 2'-O-methylcytidine-3'-phosphate
  modified_base 7: mod_base = OTHER; note = 2'-fluorocytidine-3'-phosphate
  modified_base 8: mod_base = OTHER; note = 2'-O-methyluridine-3'-phosphate
  modified_base 9: mod_base = OTHER; note = 2'-fluoroguanosine-3'-phosphate
  modified_base 10: mod_base = OTHER; note = 2'-fluorouridine-3'-phosphate
  modified_base 12: mod_base = OTHER; note = 2'-O-methyluridine-3'-phosphate
  modified_base 13: mod_base = OTHER; note = 2'-O-methyluridine-3'-phosphate
  modified_base 14: mod_base = OTHER; note = 2'-O-methylguanosine-3'-phosphate
  modified_base 15: mod_base = OTHER; note = 2'-O-methylcytidine-3'-phosphate
  modified_base 16: mod_base = OTHER; note = 2'-O-methyluridine-3'-phosphate
  modified_base 17: mod_base = OTHER; note = 2'-O-methyluridine-3'-phosphate
  modified_base 18: mod_base = OTHER; note = 2'-O-methyluridine-3'-phosphate
  modified_base 19: mod_base = OTHER; note = 2'-O-methyluridine-3'-phosphorothioate
  modified_base 20: mod_base = OTHER; note = 2'-O-methoxyethyl(MOE) guanosine-3'-phosphorothioate
  modified_base 21: mod_base = OTHER; note = 2'-O-methoxyethyl(MOE)-thymidine(or 5-methyluridine)-3'-phosphate-N-[tris(N-acetylgalactosamine -alkyl)-amidodecanoyl)]-4-hydroxyprolinol (Hyp-(N-acetylgalactosamine-alkyl)3)
  misc_feature 1..10: note = RNA
  misc_feature 11: note = DNA
  misc_feature 12..21: note = RNA
ctagacctgttttgcttttgt

SEQ ID NO: 1030 - DNA, 21 bp, synthetic construct
  source 1..21: mol_type = other DNA
  modified_base 1: mod_base = OTHER; note 2'-O-methoxyethyl(MOE)-5-methylcytidine-3'-phosphorothioate
  modified_base 2: mod_base = OTHER; note = 2'-O-methoxyethyl(MOE)-thymidine(or 5-methyluridine)-3'-phosphate
  modified_base 3: mod_base = OTHER; note = 2'-O-methyladenosine-3'-phosphate
  modified_base 4: mod_base = OTHER; note = 2'-O-methylguanosine-3'-phosphate
  modified_base 5: mod_base = OTHER; note = 2'-O-methyladenosine-3'-phosphate
  modified_base 6: mod_base = OTHER; note = 2'-O-methylcytidine-3'-phosphate
  modified_base 7: mod_base = OTHER; note = 2'-fluorocytidine-3'-phosphate
  modified_base 8: mod_base = OTHER; note = 2'-O-methyluridine-3'-phosphate
  modified_base 9: mod_base = OTHER; note = 2'-fluoroguanosine-3'-phosphate
  modified_base 10: mod_base = OTHER; note = 2'-fluorouridine-3'-phosphate
  modified_base 12: mod_base = OTHER; note = 2'-O-methyluridine-3'-phosphate
  modified_base 13: mod_base = OTHER; note = 2'-O-methyluridine-3'-phosphate
  modified_base 14: mod_base = OTHER; note = 2'-O-methylguanosine-3'-phosphate
  modified_base 15: mod_base = OTHER; note = 2'-O-methylcytidine-3'-phosphate
  modified_base 16: mod_base = OTHER; note = 2'-O-methyluridine-3'-phosphate
  modified_base 17: mod_base = OTHER; note = 2'-O-methyluridine-3'-phosphate
  modified_base 18: mod_base = OTHER; note = 2'-O-methyluridine-3'-phosphate
  modified_base 19: mod_base = OTHER; note = 2'-O-methyluridine-3'-phosphorothioate
  modified_base 20: mod_base = OTHER; note = 2'-O-methoxyethyl(MOE) guanosine-3'-phosphorothioate
  modified_base 21: mod_base = OTHER; note = 2'-O-methoxyethyl(MOE)-thymidine(or 5-methyluridine)-3'-phosphate-N-[tris(N-acetylgalactosamine -alkyl)-amidodecanoyl)]-4-hydroxyprolinol (Hyp-(N-acetylgalactosamine-alkyl)3)
  misc_feature 1..10: note = RNA
  misc_feature 11: note = DNA
  misc_feature 12..21: note = RNA
ctagacctgttttgcttttgt

SEQ ID NO: 1031 - RNA, 23 nt, synthetic construct
  source 1..23: mol_type = other RNA
  modified_base 1: mod_base = OTHER; note = 5'-(E)-vinylphosphonate-2'-O-methoxyethyl(MOE) adenosine-3'-phosphorothioate
  modified_base 2: mod_base = OTHER; note = 2'-fluorocytidine-3'-phosphorothioate
  modified_base 3: mod_base = OTHER; note = 2'-O-methyladenosine-3'-phosphate
  modified_base 4: mod_base = OTHER; note = 2'-O-methyladenosine-3'-phosphate
  modified_base 5: mod_base = OTHER; note = 2'-O-methyladenosine-3'-phosphate
  modified_base 6: mod_base = OTHER; note = 2'-fluoroadenosine-3'-phosphate
  modified_base 7: mod_base = OTHER; note = 2'-O-methylguanosine-3'-phosphate
  modified_base 8: mod_base = OTHER; note = 2'-O-methylcytidine-3'-phosphate
  modified_base 9: mod_base = OTHER; note = 2'-O-methyladenosine-3'-phosphate
  modified_base 10: mod_base = OTHER; note = 2'-O-methyladenosine-3'-phosphate
  modified_base 11: mod_base = OTHER; note = 2'-O-methyladenosine-3'-phosphate
  modified_base 12: mod_base = OTHER; note = 2'-O-methyladenosine-3'-phosphate
  modified_base 13: mod_base = OTHER; note = 2'-O-methylcytidine-3'-phosphate
  modified_base 14: mod_base = OTHER; note = 2'-fluoroadenosine-3'-phosphate
  modified_base 15: mod_base = OTHER; note = 2'-O-methylguanosine-3'-phosphate
  modified_base 16: mod_base = OTHER; note = 2'-fluoroguanosine-3'-phosphate
  modified_base 17: mod_base = OTHER; note = 2'-O-methyluridine-3'-phosphate
  modified_base 18: mod_base = OTHER; note = 2'-O-methylcytidine-3'-phosphate
  modified_base 19: mod_base = OTHER; note = 2'-O-methyluridine-3'-phosphate
  modified_base 20: mod_base = OTHER; note = 2'-O-methyladenosine-3'-phosphate
  modified_base 21: mod_base = OTHER; note = 2'-O-methylguanosine-3'-phosphorothioate
  modified_base 22: mod_base = OTHER; note = 2'-O-methyladenosine-3'-phosphorothioate
  modified_base 23: mod_base = OTHER; note = 2'-O-methyladenosine
acaaaagcaaaacaggtctagaa

SEQ ID NO: 1032 - RNA, 23 nt, synthetic construct
  source 1..23: mol_type = other RNA
  modified_base 1: mod_base = OTHER; note 5'-(E)-vinylphosphonate-2'-O-methyladenosine-3'-phosphoroth ioate
  modified_base 2: mod_base = OTHER; note = 2'-fluorocytidine-3'-phosphorothioate
  modified_base 3: mod_base = OTHER; note = 2'-O-methyladenosine-3'-phosphate
  modified_base 4: mod_base = OTHER; note = 2'-O-methyladenosine-3'-phosphate
  modified_base 5: mod_base = OTHER; note = 2'-O-methyladenosine-3'-phosphate
  modified_base 6: mod_base = OTHER; note = 2'-fluoroadenosine-3'-phosphate
  modified_base 7: mod_base = OTHER; note = 2'-O-methylguanosine-3'-phosphate
  modified_base 8: mod_base = OTHER; note = 2'-O-methylcytidine-3'-phosphate
  modified_base 9: mod_base = OTHER; note = 2'-O-methyladenosine-3'-phosphate
  modified_base 10: mod_base = OTHER; note = 2'-O-methyladenosine-3'-phosphate
  modified_base 11: mod_base = OTHER; note = 2'-O-methyladenosine-3'-phosphate
  modified_base 12: mod_base = OTHER; note = 2'-O-methyladenosine-3'-phosphate
  modified_base 13: mod_base = OTHER; note = 2'-O-methylcytidine-3'-phosphate
  modified_base 14: mod_base = OTHER; note = 2'-fluoroadenosine-3'-phosphate
  modified_base 15: mod_base = OTHER; note = 2'-O-methylguanosine-3'-phosphate
  modified_base 16: mod_base = OTHER; note = 2'-fluoroguanosine-3'-phosphate
  modified_base 17: mod_base = OTHER; note = 2'-O-methyluridine-3'-phosphate
  modified_base 18: mod_base = OTHER; note = 2'-O-methylcytidine-3'-phosphate
  modified_base 19: mod_base = OTHER; note = 2'-O-methyluridine-3'-phosphate
  modified_base 20: mod_base = OTHER; note = 2'-O-methyladenosine-3'-phosphate
  modified_base 21: mod_base = OTHER; note = 2'-O-methylguanosine-3'-phosphorothioate
  modified_base 22: mod_base = OTHER; note = 2'-O-methyladenosine-3'-phosphorothioate
  modified_base 23: mod_base = OTHER; note = 2'-O-methyladenosine
acaaaagcaaaacaggtctagaa

SEQ ID NO: 1033 - RNA, 23 nt, synthetic construct
  source 1..23: mol_type = other RNA
  modified_base 1: mod_base = OTHER; note 5'-(E)-vinylphosphonate-2'-O-methyladenosine-3'-phosphoroth ioate
  modified_base 2: mod_base = OTHER; note = 2'-fluorocytidine-3'-phosphorothioate
  modified_base 3: mod_base = OTHER; note = Adenine threose nucleic acid-2'-phosphate
  modified_base 4: mod_base = OTHER; note = 2'-O-methyladenosine-3'-phosphate
  modified_base 5: mod_base = OTHER; note = Adenine threose nucleic acid-2'-phosphate
  modified_base 6: mod_base = OTHER; note = 2'-fluoroadenosine-3'-phosphate
  modified_base 7: mod_base = OTHER; note = 2'-O-methylguanosine-3'-phosphate
  modified_base 8: mod_base = OTHER; note = 2'-O-methylcytidine-3'-phosphate
  modified_base 9: mod_base = OTHER; note = 2'-O-methyladenosine-3'-phosphate
  modified_base 10: mod_base = OTHER; note = 2'-O-methyladenosine-3'-phosphate
  modified_base 11: mod_base = OTHER; note = 2'-O-methyladenosine-3'-phosphate
  modified_base 12: mod_base = OTHER; note = 2'-O-methyladenosine-3'-phosphate
  modified_base 13: mod_base = OTHER; note = 2'-O-methylcytidine-3'-phosphate
  modified_base 14: mod_base = OTHER; note = 2'-fluoroadenosine-3'-phosphate
  modified_base 15: mod_base = OTHER; note = 2'-O-methylguanosine-3'-phosphate
  modified_base 16: mod_base = OTHER; note = 2'-fluoroguanosine-3'-phosphate
  modified_base 17: mod_base = OTHER; note = 2'-O-methyluridine-3'-phosphate
  modified_base 18: mod_base = OTHER; note = 2'-O-methylcytidine-3'-phosphate
  modified_base 19: mod_base = OTHER; note = 2'-O-methyluridine-3'-phosphate
  modified_base 20: mod_base = OTHER; note = 2'-O-methyladenosine-3'-phosphate
  modified_base 21: mod_base = OTHER; note = 2'-O-methylguanosine-3'-phosphorothioate
  modified_base 22: mod_base = OTHER; note = 2'-O-methyladenosine-3'-phosphorothioate
  modified_base 23: mod_base = OTHER; note = 2'-O-methyladenosine
acaaaagcaaaacaggtctagaa

SEQ ID NO: 1034 - RNA, 23 nt, synthetic construct
  source 1..23: mol_type = other RNA
  modified_base 1: mod_base = OTHER; note 5'-(E)-vinylphosphonate-2'-O-methyladenosine-3'-phosphoroth ioate
  modified_base 2: mod_base = OTHER; note = 2'-fluorocytidine-3'-phosphorothioate
  modified_base 3: mod_base = OTHER; note = Adenine threose nucleic acid-2'-phosphate
  modified_base 4: mod_base = OTHER; note = 2'-O-methyladenosine-3'-phosphate
  modified_base 5: mod_base = OTHER; note = 2'-O-methyladenosine-3'-phosphate
  modified_base 6: mod_base = OTHER; note = Adenine threose nucleic acid-2'-phosphate
  modified_base 7: mod_base = OTHER; note = 2'-O-methylguanosine-3'-phosphate
  modified_base 8: mod_base = OTHER; note = 2'-O-methylcytidine-3'-phosphate
  modified_base 9: mod_base = OTHER; note = 2'-O-methyladenosine-3'-phosphate
  modified_base 10: mod_base = OTHER; note = 2'-O-methyladenosine-3'-phosphate
  modified_base 11: mod_base = OTHER; note = 2'-O-methyladenosine-3'-phosphate
  modified_base 12: mod_base = OTHER; note = 2'-O-methyladenosine-3'-phosphate
  modified_base 13: mod_base = OTHER; note = 2'-O-methylcytidine-3'-phosphate
  modified_base 14: mod_base = OTHER; note = 2'-fluoroadenosine-3'-phosphate
  modified_base 15: mod_base = OTHER; note = 2'-O-methylguanosine-3'-phosphate
  modified_base 16: mod_base = OTHER; note = 2'-fluoroguanosine-3'-phosphate
  modified_base 17: mod_base = OTHER; note = 2'-O-methyluridine-3'-phosphate
  modified_base 18: mod_base = OTHER; note = 2'-O-methylcytidine-3'-phosphate
  modified_base 19: mod_base = OTHER; note = 2'-O-methyluridine-3'-phosphate
  modified_base 20: mod_base = OTHER; note = 2'-O-methyladenosine-3'-phosphate
  modified_base 21: mod_base = OTHER; note = 2'-O-methylguanosine-3'-phosphorothioate
  modified_base 22: mod_base = OTHER; note = 2'-O-methyladenosine-3'-phosphorothioate
  modified_base 23: mod_base = OTHER; note = 2'-O-methyladenosine
acaaaagcaaaacaggtctagaa

SEQ ID NO: 1035 - RNA, 23 nt, synthetic construct
  source 1..23: mol_type = other RNA
  modified_base 1: mod_base = OTHER; note 5'-(E)-vinylphosphonate-2'-O-methyladenosine-3'-phosphoroth ioate
  modified_base 2: mod_base = OTHER; note = 2'-fluorocytidine-3'-phosphorothioate
  modified_base 3: mod_base = OTHER; note = Adenine threose nucleic acid-2'-phosphate
  modified_base 4: mod_base = OTHER; note = 2'-O-methyladenosine-3'-phosphate
  modified_base 5: mod_base = OTHER; note = 2'-O-methyladenosine-3'-phosphate
  modified_base 6: mod_base = OTHER; note = 2'-fluoroadenosine-3'-phosphate
  modified_base 7: mod_base = OTHER; note = Guanine threose nucleic acid-2'-phosphate
  modified_base 8: mod_base = OTHER; note = 2'-O-methylcytidine-3'-phosphate
  modified_base 9: mod_base = OTHER; note = 2'-O-methyladenosine-3'-phosphate
  modified_base 10: mod_base = OTHER; note = 2'-O-methyladenosine-3'-phosphate
  modified_base 11: mod_base = OTHER; note = 2'-O-methyladenosine-3'-phosphate
  modified_base 12: mod_base = OTHER; note = 2'-O-methyladenosine-3'-phosphate
  modified_base 13: mod_base = OTHER; note = 2'-O-methylcytidine-3'-phosphate
  modified_base 14: mod_base = OTHER; note = 2'-fluoroadenosine-3'-phosphate
  modified_base 15: mod_base = OTHER; note = 2'-O-methylguanosine-3'-phosphate
  modified_base 16: mod_base = OTHER; note = 2'-fluoroguanosine-3'-phosphate
  modified_base 17: mod_base = OTHER; note = 2'-O-methyluridine-3'-phosphate
  modified_base 18: mod_base = OTHER; note = 2'-O-methylcytidine-3'-phosphate
  modified_base 19: mod_base = OTHER; note = 2'-O-methyluridine-3'-phosphate
  modified_base 20: mod_base = OTHER; note = 2'-O-methyladenosine-3'-phosphate
  modified_base 21: mod_base = OTHER; note = 2'-O-methylguanosine-3'-phosphorothioate
  modified_base 22: mod_base = OTHER; note = 2'-O-methyladenosine-3'-phosphorothioate
  modified_base 23: mod_base = OTHER; note = 2'-O-methyladenosine
acaaaagcaaaacaggtctagaa

SEQ ID NO: 1036 - RNA, 23 nt, synthetic construct
  source 1..23: mol_type = other RNA
  modified_base 1: mod_base = OTHER; note = 5'-(E)-vinylphosphonate-2'-O-methoxyethyl(MOE) adenosine-3'-phosphorothioate
  modified_base 2: mod_base = OTHER; note = 2'-fluorocytidine-3'-phosphorothioate
  modified_base 3: mod_base = OTHER; note = 2'-O-methyladenosine-3'-phosphate
  modified_base 4: mod_base = OTHER; note = 2'-O-methyladenosine-3'-phosphate
  modified_base 5: mod_base = OTHER; note = 2'-O-methyladenosine-3'-phosphate
  modified_base 6: mod_base = OTHER; note = 2'-fluoroadenosine-3'-phosphate
  modified_base 7: mod_base = OTHER; note = 2'-O-methylguanosine-3'-phosphate
  modified_base 8: mod_base = OTHER; note = 2'-O-methylcytidine-3'-phosphate
  modified_base 9: mod_base = OTHER; note = 2'-O-methyladenosine-3'-phosphate
  modified_base 10: mod_base = OTHER; note = 2'-O-methyladenosine-3'-phosphate
  modified_base 11: mod_base = OTHER; note = 2'-O-methyladenosine-3'-phosphate
  modified_base 12: mod_base = OTHER; note = 2'-O-methyladenosine-3'-phosphate
  modified_base 13: mod_base = OTHER; note = 2'-O-methylcytidine-3'-phosphate
  modified_base 14: mod_base = OTHER; note = 2'-fluoroadenosine-3'-phosphate
  modified_base 15: mod_base = OTHER; note = 2'-O-methylguanosine-3'-phosphate
  modified_base 16: mod_base = OTHER; note = 2'-fluoroguanosine-3'-phosphate
  modified_base 17: mod_base = OTHER; note = 2'-O-methyluridine-3'-phosphate
  modified_base 18: mod_base = OTHER; note = 2'-O-methylcytidine-3'-phosphate
  modified_base 19: mod_base = OTHER; note = 2'-O-methyluridine-3'-phosphate
  modified_base 20: mod_base = OTHER; note = 2'-O-methyladenosine-3'-phosphate
  modified_base 21: mod_base = OTHER; note = 2'-O-methylguanosine-3'-phosphorothioate
  modified_base 22: mod_base = OTHER; note = 2'-O-methyladenosine-3'-phosphorothioate
  modified_base 23: mod_base = OTHER; note = 2'-O-methyladenosine
acaaaagcaaaacaggtctagaa

1. A double stranded RNAi (dsRNAi) agent comprising:
(i) a sense strand comprising a nucleotide sequence selected from SEQ ID Nos. 3 to 381 and SEQ ID Nos. 761 to 776; and
(ii) an antisense strand forming a duplex with the sense strand and comprising a nucleotide sequence selected from SEQ ID Nos. 382 to 760 and SEQ ID Nos. 777 to 792.

2. (canceled)

3. The dsRNAi agent of claim 1, wherein one or more nucleotides in the sense strand and the antisense strand are modified nucleotides.

4.-6. (canceled)

7. The dsRNAi agent of claim 3, wherein each of the modified nucleotides independently comprises one or more modifications selected from 2′-deoxy modification, 2′-O-methyl (2′-OMe) modification, 2′-fluoro (2′-F) modification, 2′-O-methoxyethyl (2′-MOE) modification, the modification containing a non-natural nucleobase, TNA, GNA, 3′-phosphorothioate (PS) modification, and 5′-vinyl-phosphonate (5′-VP) modification.

8. The dsRNAi agent of claim 7, wherein the sense strand comprises one or two 2′-MOE modifications positioned at the 1st and/or 2nd nucleotides from the 5′ end; and/or wherein the sense strand comprises one or two 2′-MOE modifications positioned at the 1st and/or 2nd nucleotides from the 3′ end.

9.-11. (canceled)

12. The dsRNAi agent of claim 3, wherein the antisense strand comprises a 5′-VP modification at the 1st nucleotide from the 5′ end.

13.-39. (canceled)

40. A double stranded RNAi (dsRNAi) agent comprising:
(a) a sense strand comprising SEQ ID NO: 800, and
an antisense strand comprising SEQ ID NO: 853;
(b) a sense strand comprising SEQ ID NO: 801, and
an antisense strand comprising SEQ ID NO: 854;
(c) a sense strand comprising SEQ ID NO: 806, and
an antisense strand comprising SEQ ID NO: 859;
(d) a sense strand comprising SEQ ID NO: 811, and
an antisense strand comprising SEQ ID NO: 864;
(e) a sense strand comprising SEQ ID NO: 813, and
an antisense strand comprising SEQ ID NO: 866;
(f) a sense strand comprising SEQ ID NO: 830, and
an antisense strand comprising SEQ ID NO: 883; or
(g) a sense strand comprising SEQ ID NO: 1016, and
an antisense strand comprising SEQ ID NO: 1022.

41. The dsRNAi agent of claim 40, further comprising a ligand.

42. The dsRNAi agent of claim 1, wherein the ligand comprises a N-acetylgalactosamine (GalNAc) moiety.

43. The dsRNAi agent of claim 42, wherein the ligand has a structure of: [chemical structure]
wherein:
each L¹ is independently a linker which may be same or different in each occurrence;
L² is a linker;
n is an integer from 1 to 3; and [symbol]
is an attachment point to the sense strand or the antisense strand, or to a conjugate linker conjugated to the sense strand or the antisense strand.

44.-46. (canceled)

47. The dsRNAi agent of claim 43, wherein the ligand comprises the following structure: [chemical structure]
wherein [symbol]
is an attachment point to the sense strand or the antisense strand or to a conjugate linker conjugated to the sense strand or the antisense strand.

48. The dsRNAi agent of claim 47, wherein the ligand is conjugated to 3′ end of the sense strand to form the following structure: [chemical structure]
wherein W is —OH or —SH.

49. (canceled)

50. The dsRNAi agent of claim 48, wherein W is —OH.

51. A double stranded RNAi (dsRNAi) agent comprising:
(a) a sense strand consisting of SEQ ID NO: 906, and
an antisense strand consisting of SEQ ID NO: 963;
(b) a sense strand consisting of SEQ ID NO: 907, and
an antisense strand consisting of SEQ ID NO: 964;
(c) a sense strand consisting of SEQ ID NO: 947, and
an antisense strand consisting of SEQ ID NO: 1004;
(d) a sense strand consisting of SEQ ID NO: 948, and
an antisense strand consisting of SEQ ID NO: 1005;
(e) a sense strand consisting of SEQ ID NO: 949, and
an antisense strand consisting of SEQ ID NO: 1006;
(f) a sense strand consisting of SEQ ID NO: 950, and
an antisense strand consisting of SEQ ID NO: 1007; or
(g) a sense strand consisting of SEQ ID NO: 1028, and
an antisense strand consisting of SEQ ID NO: 1034
wherein the ligand (L96) is conjugated to the 3′ end of the sense strand to form the following schematic: [chemical structure]
or a pharmaceutically acceptable salt thereof, wherein W is —OH.

52. The dsRNAi agent of claim 1, wherein the dsRNAi agent is in a pharmaceutically acceptable salt form.

53. The dsRNAi agent of claim 52, wherein the pharmaceutically acceptable salt is a sodium salt.

54.-55. (canceled)

56. A method of inhibiting PCSK9 expression in a cell, the method comprising:
(a) contacting the cell with the dsRNAi agent of claim 1 or a pharmaceutically acceptable salt thereof, and
(b) maintaining the cell produced in step (a) for a time sufficient to obtain degradation of the mRNA transcript of a PCSK9 gene, thereby inhibiting expression of the PCSK9 gene in the cell.

57. A method of lowering a level of low-density lipoprotein cholesterol (LDL-C) in a subject in need thereof, comprising administering to the subject the dsRNAi agent of claim 1 or a pharmaceutically acceptable salt thereof.

58. A method of treating lipidemia mediated by PCSK9 expression in a subject in need thereof, comprising administering to the subject the dsRNAi agent of claim 1 or a pharmaceutically acceptable salt thereof.

59. A method of treating or preventing atherosclerotic cardiovascular disease (ASCVD) in a subject in need thereof, comprising administering to the subject the dsRNAi agent of claim 1 or a pharmaceutically acceptable salt thereof.

60. A method of reducing or preventing cardiovascular event in a subject in need thereof, comprising administering to the subject the dsRNAi agent of claim 1 or a pharmaceutically acceptable salt thereof.

61. The method of claim 60, wherein the cardiovascular event is cardiovascular death, non-fatal myocardial infarction (MI), non-fatal ischemic stroke, urgent coronary revascularization, coronary heart disease (CHD) death, or any combination thereof.

62. A method of reducing or preventing a major limb adverse event (MALE) in a subject in need thereof, comprising administering to the subject the dsRNAi agent of claim 1 or a pharmaceutically acceptable salt thereof.

63. The method of claim 62, wherein the MALE is acute lower limb ischemia, lower limb amputation due to ischemia, urgent lower limb revascularization for ischemia, or any combination thereof.

64.-75. (canceled)

76. A kit comprising the dsRNAi agent of claim 1 or a pharmaceutically acceptable salt thereof.

77.-79. (canceled)
